United States Patent Application Publication US 2005/0260659 A1 - sequence listing, part 3

SEQ ID NO: 54 - DNA, 150450 bp, Homo sapiens
caaatatttgacccattcaatcaaatatttgacctactacacatctggcactgccctgggtaccagagatataccatgataccaaaaggacaaagattccttcctctcatctcttttcacagtaactgtgattctcagtcctggttgagaatacactggaatcacctggagaacttctaaaacatactggtgcccaatgtccacccctggtaattaaatcagaagctctggaaatgaaacctgagcatagggattttcaaaaatccaccaagtgattctaaagtgaatccagggctgagaatcttttcatgtattagattatgctgtatgctgtatgctgcatatgttttgaggtcactaccctcaaaacacattgtacagaaatgcatataaatagaacacacttagaaaactattttaaggggatataaaaggaaatttgaaatcgtgtgagatgtattcaaagtgttggagtttacaaaaggaaaaattacttttggattgggatgagatcatgcaagtataactttttaaataaagggaatgtcgaggggccacttgaatgtaggatatacctttgactaaagaaatgtttctcagactttggtatgtatcagaatcatttatgaaacttggtaaaatgcagatacccaggccctgtgttactcccacaaggtcgggcctctctatactttgctagttctgatgattacaacacacagtacagtctggtaatcatcaggagagaattttgaagacatttttggcagataagaaagtggtttttactgggagacaaagaaaggctagaatgagtatagcatgtatggtgtgggggtggggctgataatgttaaggaaatctacataatttagatagaagatgtgatgattaattttgtgtgtcaatgtagctgggccacagtgccttgatatttggtcaaatattattctgaatgtttctgtgaaaatactttttgcatgagattaacacttaaacagacagacgttgactaaagcagattaccctccataatgaggatgagcctcatccaatcagttgaggatcttgatacaacaaacactgacctctcccaaacaacaaggagttgtcagcaaactgcctgtaggactcagactacaattctttcctgggtctccagtgccagcttcacctgaagattttggacttgaccctccatgatagtgtgagccagttcatctctttcaatctctctctctctttcgcctctacacagacacacatacacacacacacacacacacacacatgcacgtacacaccctggttggttctgtttctctggaaatccctaacagagaaggagaaattagaaaaatgacagaatacattaacagaaggccttgatggacacggtaaagagcttggtctttatctgattgtaattctggaagttttcaaataaaccaagggagacttcagagtacagatgttgccttcgccactcacagacagagcaaacaccagtgtatagcgttggtcaatcccagttgttcttttcttgttaaaactggcaccccagaaagagaagcagctacgtagaaacatgtaatttatagagcaagatttaaaagttcactgaactgtgagttttcttaattggtatactaaggaaccactaagatattcacagggataaagtgcaatagaagtgaaatagggtactgaagaatgaggctggagatttcaaatccttgaggtactaacctcatgttctgctgtcattttgtgagatgttaaatctgtactttttgatgcagtaaccatgaaaaagtccctagtgtttaaacaaataaatcaggttagacttcaaatgatttaaacaaagaacactagaaattttgtaacctgcattcctaatttcattttcaaaactttttgctcacatacatcttttgtccccagtgccactagacagataggaaaagctgctgaatatgaatttgctttaaaaatgttgctgaaattatctatgcttattatactctgttatagctatggagttaagcgaattttctctgttctagacctgtaaagattttcttctgaatttgtctcaaatctgtccattttctttccagtgtatactaggctgtgttgaaatgctactccattcattcatatacccacttatcctattcagcatttattaaagaaatatgtattgggtacctaccttaaatcccacacagtgccagctactggggatacaatattgatcaagacaaaagatacaaccttgttctcattagagtcttataatatttttaaatgatgtctcaaaatgaaaaggtaaataaggtaaaatgttccaaatgatgctgacccagtgacctgatgaaactgcattggctttgcaaacatgttgaggttttctttgttggtgcttgatttctagaaactgcatggagcagaactttcatgagtggagattctaatagacatacttttccaggagacatgtgatgtgaagtagtttaaagctttcctccttcctcacttccccaacctctcctctctttcatttcatgagtatgttcgaatctctactaagaacaaggttgggtaaggatatggtgagtgaaaacacagtctttccactcctagagcttacagtaaagtaggggaataaggaaggaattttttaaaaatcacacaaatcaatgtaagctctattaaaagtacaattattgaaaggcacatatagaaatgacagagggagctcacttagtctggagagtcagaaaaattaccaaacctaggtacctttatttctactcacagaaaattataaagttctattcatgcagtagctcagttaacttagtatcaatcaatgtcaggaataacatgattcttttctctgaaatgctttataaaatgtctgctgttaaatatcccagaagaggttacttttcttatttgtatggccagacaactctattacataattgtgaggaaggttaatttcccttcagagtgggtaaatagtatctgagttgaaaatggattcccccatagggcaaaaatagagacaaccagagcactctctgctataataacattaaatctcccttctggatgtgcaagtccaagtggctgctatttaatcattatatatatttgtcttatgggctacagaaatggtctttaggatcacctggagagctgaaatactgactcctgaggtccatccctagacatgttgatgggtttgatttaactgtgtttttagaagctctctaagtgattctaatgtgaagctatgatttaaaaccatcaggcaacagtgatctcaaacctcaggtcactgtcattctaaatgtgacctatattctctggtcacagtcttgcctattattctcaaagttttgcactctaccagtgttttgactctgggaagagaggtcccagtattctcagaagttaagaagcattctgtgctaatcacatgttattgatcattattggttaatacatttcagaggtgaaatactcgttttataaaaagacttaaggcagggaatgtttggggtacaatatgaaaaactatgtgtgggtttgaaatgcatctaaagactgaatcttgtgacacaaagtctagtggggatgtatattgaagtatatttagctcaagagacacttaaaccaaaacaaaaatttgcagttacagtaaccataaattacagtatctggaatgctgagaaaaatttctatccaaattcaactagacttaaactatagtaatgattcttaaggctagacagtgatgtgtgtgtcatgctggacccctagtgacttcaatagggataacactatgttagagaggcctaatagttctgggtgtctgctgctccaagtgttcatctcattcattcattcattcatgtattaatcattcaatcatgtaataaatatttaagggtctagtcggggccccatactgtgctagcttctaggatgtagcagagaacaaggcaaacgaggtccttgtaatacaatgcttatcatctaatttggaccacagactagcaaacaagcaacagcaggaatctgtgactaatgcaagcagagatctgatgtggggtacgagggaaactcaacacaggagcagctcaccaatctatggggtacagaaagggcttccctgagaaagtgacatttaagcaatagcttgaagaatgaataggaacagtgagaaaaagaagaaagtggggaagaacattccaagcggagataacaacaattacaaaagcacagggtgtgagaaacagagcaaggtcctttagggcagttggaagaagttcagtatagtaggagcaggtagtgccaaagcaggaagtgttacaacaggaaacacttaaggaagaagggtcaggtcacaaatgcttaaaagagattaaatggtaccctagggtgttggcagctgttgaagagatttacactggggagtgatttgatcagatttggattttaacatgttcactcaggctactggatggcaagagagttggaggcaggatgaaaggagacttgttagactgtcagaggaaataagagtggagaatgcttggaagtagggtaatgacaatgaggtaaagaacactggatgaatttgtgagagatttaagaagaatcaggggcaccaatgcttcatttaaattccacagaggaaagtagcttttttgggtctatttttttcactgataaatctcaaatgctttgaccagggcctggcacacagtagaagatgatgaatatttgaagaattgattggatatagtaggtaacttagaagaatggattgagaatattatccaagttttgggcttgggaaactgagaagctagtggttccatttactgagagaggaaggaaaaaaaggggatgtccagggggaacaatgggaccagtcatgttttagatatgttttgtttgacaaaactttgaaacatggaaatgtgaagtagggagtgagaactcaggagaaagttcggggctagggatttgtgaatctttaatgtaatttttattttatcaatggaacatttaatgtgaccatggtggagatggctatgtaaggtatgcagaggaaaaacagaggaatatctaagatgcaccccaaggaacactaacatttaagagacctagagaagaagggatttctctctttctccagatacctattttgcaccttcttcataatatgccactagacctatctcttccaggagctcttattttattaaccttgactcaagaagagagaacattaatatctataatttctcaaaatcccttggtgtctaaaatgtatggctgggtgatcacttcttcatttgctaccttaaatcttgttttcaacctaacgaagattttggacacagtgctattgtatcaatttatactatattttcacagtgctattgtaccaatttatactatattttcacttgatatggtaaagtcatagtcacagacatccaatttaatggtaattattatcatttttttctgcagagcagaattatcaaattcagaaatgggagaacctagagaaagcatctgtcatgcttttattttacacagggaatttgtacttactcaagattatttggcggcagaatggagattcgaatacagagtttctagctcgcagttcaggcttatcccactattctaccctgtgtctcatactttcataagttttagtttctgtgcttatttaggttaaaaccccttgaaggcaaagaccatgttacttttgtagtgtttcttcatcctcgatgtacgtagtgcagtgctcaaatgtagagaaggggaaaaggagcgctggggctgatgttctggatgctacagggtcactgttcaaaatgatcagacaattcccttgcaacataacaagggtttctttcactcatgtaaccttggtgtcaaagatgcagcacgcagagaatctaagtacttcattaaggtgtcccattcctttagctccagaagacttcttaactgacctatcctgtagcttaaatccacccccttccacttgcaaccacacagtgtatcaaaattaagtattattttaaaaatcagtaatatatgcatataatgccagtttatgatacagctatcttgagggtgtcattctctttgctcagttgtgcaaggcacctaaatttatcaaggacaccaaagataatggcaagggagtgttgggttatacaaacaataccgtctgtattttccgactggatattaaaataacaatagaagccacattggaaggcctactatatgcaaagctctgtactagatgccttgcataaataaacctatttcaatcccctcaaaaactgtgaggtgcagaaaccaagaatcagagattgtgggggattttcctaaggatacacagtccctaaatggcagagtcaggatttgaactcagatctgattccaaaacccattcccttctcattatgatacattgaaataactgaaattcaaccttctgtttatctctcaatagtaaagaatattatttttattctacaggaaccacattctacttgtgtaggagctgcgacagtaaccaactcatcctgccctactcacagtatagcatctttaggcattgactacaatcagccaagtcaccggctgaggggaagaacaagaaccaaccttgaactatgatctaagacaaggtgtccaatcttttggcttccctgggccccattgaaagaagaattgtctcgggctacatataaaatacaccaacactaacgataactgatgagcttaaaaaaaaaatcacaaacacacaaatctcataaggttctaagaaagtttacgaatttgtgttgggcggcattcaaagccatgctaggtcgtgtgtggcccaggtgggccacaggttgaacaagcttgatctaagataaagtggttctgaccttcagcctaaattcctctcactagcattcgagatggaatgaggtcagggcacacactttcatgttttcttgctacaaattacttggatgagaaatttccctctgaaaatactaaaaaagtgaagaggaaaacagctacttcacccttaattctgaccaagaagggaaaattgtgaactaaaaggcagccacatgttccttgggaaagaaacaatcacatgatcttcgtttaattagccagataataaaaccacggatttgttagtcaaaatatatttgactattctgtgccagacattgttctaggcacaggagagaacaagacaaagacccatagcctcggattgctgacatttctatgtacagagaaaaatagacaaataaacattaagatttcaacatttatcctagagtttagaaaatctaactttaattgtttttagaaatttttaaaatctaaagtcctaataccagacaaatggttccaatttttctttttgatttttaaaaaatttacaataagatactttgaaaatggaaacctggttttaaagtgaaaatgtattcagtgactaatgaaatttccatgggaacagtggaaagaatactgtcacaaaggatagttgccatcttttgatggttatttaaagtcttggatatgttagaaaatgtatcgcaattttaaaatcagtattctttgttactttgtatcaattcaattaaggcaacatcctattccatagtgaaaatatagctattctgttaaactccagcttggaatacattttaaagtgcattcttaataaaaaattttaaataggagaacatggaacaaaattaaaagtattcaggaaaataattttatacctagagacactagagaagaaggttaactcaagagtgaccaaagactttagatgttctagtatttttttttctttttagaaattagacaaatttaatttgtggaaaattgctagaatgaattcatgaatatagtttgcgagcatgtaggaaatgaaatggtgatttttaggggatcatgggtatcttggtaacagatcatgcttttttaatgagcagaacaaaatgtgccacaaacacagtgccttggtatttgtaaatcattttccaaaatttttcacaatatctatataaataagatttttaaaattgtatgtataacactatagttggcaagtttcattcctggttccacaataacactgattagtggttggatggaaagccggcaggaatgtgttgtgtctgttcctgtttaacatttctgtaagtgatttggtgaggatacagaaggcatgttattgaatgtgtagatggacaaagtttagggtaaaagttaatgtgtttgaaaaaagaggttatattaaaaataccttcattgactggaacaattggaaaggacatacttgtctgcctacagggacagaaaactcattaccatggtggctttttcattgggtttgctagggccagaatccagaactcattgagtacttcttcttatagcatatatagcaattcattaacattggggaataataataatacaatagtcattgtccagaaaggactaactttaatggtaaaaggctttttttgtcatcattttcttcaaaagaataaaaatataaaatattaaagtaggaaaatatcccatagaaataatgcattttaacttttctcttttaatacaaagatcttctataacatcacacatatgtggctatcaaaccttatttatatatataaaaatatataattattattttattttaaatatatatttatatataaattattattttatacatatatatatggtgcttaaaacagtgcctagaacttactcactcaaaaaatatttgttgattaaatgattttatggaagggaagtgtacatctttttttttttttttttttttgcgagacagagtcttgctctgtcacccaggatggagtgatcttggctcactacaacctccgcctcccagattcaagcgattctcctgcctcagcctcttgggtagctgggattacaggcatgcaccaccatttccagcttatttttgtatttttagtagagacggagtttcactatgttggccaggctggtctcgaattcctgacctcaggtgatccgcccacctcagcctcccaaagtgctgggattgcaggcatgagccaccgcacctggccaagctcacacctttcttaagtaccatatttcatttctagaagctactaatttttgaaatagtcttcctcatactgagtcaaacccatttttctgtaactctttacttataaaacacaattatgctttcctgatatggacaaagtaaatctagctgtcttccaaatattttaagacagttggcattttccctttaagtatttgttattttttccaggtagaagttaactaactcctgaaccttcttcatataacatggtttcctatcccttcatcattcttatcattttccactgaatgtgggtcaaattttcgaggattttcttatttcttaaaatgtgttgccctgaactaaagaactcttcagatgaaagttaatctgaacaccacagcacattattgtaagatattagctatcacagacagctatataagcagtgattatttcagtctgaaatcaattaaaatctttaagtgttttctgaaactacagggaactcctagctgacacctgagttaaacatgttaacgttttttaaaagtaaaattatactttagttttgtttcctatagcgagtcttttagtttctcattttcttagcagaaggataaaaatgaagcatttattataagaaaaagcttttttttcctgtaaaatcatttaaatttggttttaaaatctcatacaggcctaatcagatgacattcatttttctctgtgtttagtcctgagttttgaaagtaacaccctggtactcatggccttggccctccctgggcaggaagcctgcccaggccctaggtcagcatgggcactcggtgagggaggtgcaggaggccagctggggaagaggccactggagcacagcagagccagattgcccaagtttccctctaggccaaacagacacgaagattgcatgagcattattattggcaaatcgggaaccttgcttctctactgcgtgctctgaaaggaggaagaatgctagggttttttccctggaagggagaaaagagtaaacagacaaaaaagcacatcaggacacattcctcccagtcctcctcacatactgaggctggaatgaatatgagtcagaggggagtctcttccatatggacctaagagggtgcattgcaattagagtaagaattctgttcattcatccttaggtaacggattttgagcaatttgcaggtctaggaaaggtaacagtagatgtgaggaagacccagtctgtactcgcaggagccccctcctccatctttcctgcaccacagtgagccagccctgcctacccactctctcttccaggctgccgcagtccctgagcctgctccacgtgaaggcagccatggccaggcaaaacccatgtgccctcaggggtcacatagccgagatactcttggcatttaagtgcatagaagttggatgagggcagggcgcggtggctcgtgcctgtaattccagcactttgggaggccgaggcgggcagattgtgaggtcaggagttcgagaccagcctgaccaacatagtgaaaccccgtctctactgaaaatacaaaaattatccgggcatggtggcacacgcctgtaatcccagctacttaggaggctgaggcaggagaatcgcttgaacccgggaggcagcagttgcagtgagctgagatcatgccactgcactccagcctgggggacaaagtaaggctccatcaaaaaaaaaaaaaaaaaaaaaaaagaagttggatgagtacttccaggggaaggacagagaaggaggacctactagtgacaggggactctttctaaggtcctggcaattccactccacctccaaacttacacactacactcagccaaacacaaacttgatctgagaagactctttctccttagaagagaggttagctaccatatcttgttctctgagcattcccctttggagtcttatcccaaatttcacccacttcaagccacttatcaatgtattcctttaaacacctaacagttctctccctgagaggagttccagtgataaaattttctccattccaaagagggacacaactttgcaagtctagaccatacatgcagttggctgcacagtagcagtcccagtgacgttttatgcccccccgagttgttaggctgttaaacagcttttctgaggcaaataaaacaaggctatttaacagtggtgccttggaaaatgccctgatggccaactgatcaaatatgggattgtccaaggctagatcttacgttcttttcatgtatgggtctaggccccacttccttttctaggccagggtgatcgggggctggtccaaatggagccaacagtgatgtgatggaaatgagctctttctgccttgccacgtagcttctttcccttgccatgagtctagttttctgcaactataataaatctggaatggcagatccttgatctacacttttctgagacctcaaaggatgagtcttccccagtaacactggctaactctttgcagaaatttcagtgtctgatgctctgttcctaagagttcaagaaaaacctgggtgagccttgcaacactactgccccctagactggggagaggttcaagccactggatacaagaagaggttaaaatttgtctacaggatgaagtgatcaacctctagagtctagctcaggaggaagcaatttcatttctgaactactgaaccataattcacaagcggaaaggatttccacatagttcaaaccattctttgtaggaatgcaatgttcagatatcattatatgggaaaataatatgttctatttatttatttgttctttctgtccttccatcctcatccccagccaagccacaatctcttattatgaattcattttgagaaaaaaataattaaaagtatttcccaacagaatagtttctcaccattccctcagctatatttacatatggctgctgcaatggtctccaggtacaatgagacgaagacttacaataaagaatgtcaactgaaggaaatgaagaagtaaataaccagacataattggcccctactgccctccccttggcaggtaatcacttctattctctattttcctcatacttttttatgctgagatgacaggatttggagagactcaccttacctctaaactcaagagaagatgctggaacaaagctctaatttacaaattgaaggaaaaatttaaatgcaacaccatctttaaattatagtcaaggcatttctcatcttattttcctttctttttttctgttttttgtgaacaaatagccttgttttattggcctcaaaaaaggttgttttacattctaaatactggacaggccatccccccatcagccagacaaaacacattagtggattgtattcagccagaggaacacaactttgaaagtctagaccatacatgcaatttactgcagatttttaaaaatctcatcttttatttcttccaagttcctcaagaactctgtaggagtcatcattacctcatttagtctcctcagcaacaaataagagaaatattatctccattttacagaagcacagactgcagagattgagttcccccaggagcacacaagctggtaggtggcagagctaagcaaggacgctgtgacattaaagtccatgctcttaatccttaggctgtgctgcttctaggtagtaagtgaggaaagcaaaagtaacctccgtgttgaactcacatttggctgttgtatcttcagggtgttactgtggcctgaggagccacaatgctgcggggcaaaggagggaaggtgacccggccacccttctctgcacacaacttctcatcccactctatgtttgtatcacatgtcttttctaagaacctctcgttctcttttcccagcccctagaagcaacaggatttggtggaaaactggcagaattttttcttcctagtctagtctatttttggtcactgtgagagctcgggcaagtcctaattgttctcagttccaaatctctaaaacagagtaattatctcccactctttctgaaagaataaaatgataacagtgcatatgaaagtacttcataaatgggaaaataatctatataatagattggtccaagcttaagtttgaaaagttgagaacccactggcaaaaaataaagtggcataaactgatttttttctcttctagtactgtacctaaggtcctaaaacatattggtgatatggaaggtagacaaaatggccaaatagaagccttcacccattgttctccctgcagaaacactaaattgaacaactatccacacataaatcaccttcatatgaagcaaaaatcaggtgagtgatcacagtatctggttttaacttcatatcactgagagaggcactgaagagggtaggaaagacagtcttgaatcaccaatggcacagagatagaatctgtgtgcatgggggaaggagggcacggtgattgtgggactttgcattggaactcagtactgccctgtcaaagccgaaagcaacactagaagaactcagccggtgcccacagagggagaactgaggccagccctaggcagaggtgagttatccatcccagtgtttggaacctgagttccagctagccccatcactgaggggcaaagtgctctggggtcctaaataaacttagaggccagtctaggccataaggactgcaattcccaggaaagtcctggtgcagtgctaggattggagccagtgaacttgggatgcacatgacatagtaagctactatccagggtatccagagaagtgcttgtgtcatgcctcttccaacaccaggcagtacagctcccagccccaaaagggattatttccacttgaggagaggggagaataaagaaaactttatcttgcaacttggataccagctcagccacagtaagatagggcatcaggcaaagtcctgaggcccctatcccagatgccagctcccagatacaccctgggctagaagggaacctgctgccttgaagggaaggacccagttctggcaggattcatcacctgctgactaaagagccctgaataatcagcagtggtaccccggcagtatcactatagcccttgggtaagactcagagatgtgttggcttcaggggtgacccagtcttttcccaccttgggtggctgtggggagggaccccttctgcttgagaaaaagagagggaaaagtaaagggacttcgtcttgtagcttacctaccagcttggccacagtagggtagaacaccaggtgtcatcttggggttcccaattctaggccttggctcttggatgtcatttctggacctgccctggaccagtcaggagctcactgccctgaagggagagttccacatctggcatttaccacagcttgactgaagagcccttgggccttgaatgaacattggtggtagccaggcagtactcactgtgggcctggggcagtggtggccacaggagagaagagactcccctgcttgtggaaagggaaagagtgagaagaacttcatcttgtggcttgggtgccagcttagctgcagtagaatagaggaccacatagattcctaaggtttctgactctaggccctggattctagatggcatctctggacctgcacaggatccgggggaacttacttacctaaggagaggatacaagcctggttggcttcacaacctctcatcataagagtcctggggccttcagccttgagcaaatgtaagtggtagtcaggcaatgattacagcaggacttgtgtgagacccagtgctttgcaagctttaggtcagacccagcacagacccagtgggggtggccacaggggtgcttgggccacccctcccgcagctccaggcagctcagcacacagagagatactttgtttgagggaaatgaaggagtgaagaccagtctctgcctgttaatccagataattcttctgtatcttatccaagtccaccaaggtggtacctctatgagtctgcaatagccacagcattactgggcttgtgatacccctaaacagatacagctacagtgatcaaacacttagatcacagcatgcaagtcccttcaaatacctagaaagcctttccaagaaggatgggtacaaacaagcccagattgcaaagactataataaatacccaattctccaatgcccagatgctgacaaacctccacaaacatcaagaccagccaggaaaatatgacctcaccaaatgaactaaataaggtaccagtgaccaatcctggagagacagaaatacataacatttcagataggtaataagtaattttgaggaaacaatgaaattcaagataacacaaagaagaaattcagagtctgatcagataaatttaatagggagattgaaatcattaaaaagaatcaagcagaaattctgaagctgaaaaatgcaactgacatactgaagaatgcataaaagtctcttagcagcagaactgataaagcaaaagaattagtgatcttgaaggcaggctatttgaaaatacacagtcaacagagaaaaaagaaagaagaataataaagaaagaaacacacccacaagatctagaaaataccctcaaaatgacaaatctaagagttattggccttaaagagtagaggctttaaagagtagagggtagaaagttaattcaaaaggataatgacagagaacttcccaaacttagagaaagatatcaatatttaagtacaagaaggttataggacaccaagcagatttaacccaaatatgactacctcaaaacatttaataatcaaactccaaaaggtcaaggataaataaaggatcttaaaagcagaaagagaaaagaaacaaataacatggtgttgctccaatatgtctggcagaagacttctcagtggaaaccttacaaggccaagagagagtggcatggaatatgtaaagtgctgaaagaaaaaaaaacaaatacatccagcaaaaatatccttcaaacatgaagagaaataaagactttgccagacaaacaaaggctaagggaattcattgaccacacctgttctataagaaatgctgaagggagttctttaatcagaaagaaaaggaaattagtgagcaataagaaatcatctgaaggtataaaattcactggtaatagaaagtacacagaaaaacacagaacattataaaatataattgtggagtgtaaactgataacttgagtagtttttctttcagaaaaactgaaagataaaccaacaaaaataactacaacagcatttcaagatagagacaatacaataagatacaaataaaaacaacaaaaagttcaaaagtacaaagacaaatgtaaaatgtagtttgtatcagttttctctctgtcagtttgtttatgcaattggccctaagttgtcatcagtttaaaataatgggttataaggtgttatttgcaagcttaatggtaacctcaaatcaaaaaatgtaacaacagatgcacaaaaattaaaaagcaattaaaagatacaaccatagaaaatcaccttcactaaaaggaagacagaaagaaaaggaaagacaaaactgcaaaataaccagaaaacaaataagaaactggtaggagtaagtctttactcctgaataataacattgaatgtaaatggactaagctctccaatcaaaagaaatagactgtctgagtggattaaaaaacaggacccaatgatctattgcctacaagagacacatttcacatgtaatgacacatatagggtgaaaataaagggatataaaaaaacaatcataccaatggaaaccaaaacagagcaggaaaagctataatcatatcagacaaaatagatttcaagaaaaaaaactataacaagagacaaagaagatcactgtataatgataaaggggccaattcagcaaaaagatataacattttaaatatatatgcaaccaacactgagacacccagatatatagggcaaatatttttagagctaaagagggaaatacagtccaatacaataatagctggagaattcagtgccccatattcagaattagacagactatccagacagaaaaatcagcaaagaaacattggacttaatctgcatcatagaccaaatgcacctaataggtatttgcaggacttttcatccaatggttgcagaatatacattcttccccagcacatggatcattctcaagaatagaccataagttaggtcataaaacaaggctctaaaaattcaaaaaaaattgaaattatatcgtgtatcttctctgaccacaatggaataaataacaagaggaatttggggaactatacaatcatgtagaaattaaacaacgtgttgttgaatgaccagtgggtcaatgaaaaaattaagaaaaaaattaaaaaatgtcttcaaacaaatgataatggaagcacaagataccaaaacctttgggatacaacaaaagcattactaagaggaaagtttatcagtataagcacctacatcaaaacagaagaaaaacttcaaatatacaacctaatgttgcatcttaaataactagaaaataaagagcaaaccaaatctaaaattaggagaagaattaataaagatcagagcagaaataaatgacattgaaatgaagaaaacaatacaaaagatcaataaaaggaaaagttgctttcttgaaaatattaataaaatcaacaaacctttactcagactaagaaaaaatgggagaagatccaataaataaaatcagagataaaaaggaaacattacaactgataccacaaaaactcaaaggatcattattggctactataagcaattatatgccaataaattggaaaatctagaggacatgaatacattcctagacacatacaacctaccaagattgaaccataaggaaatccaaaacctgaatagaccaataacaggtaacaagatagaagccataataaaaagtcttccagcaaagaatgccatcagtgacccgatggtgtcactgtgaattctaccaaacatttaaagaagaactaataccaattctactcaaactattccaaaaaatagaggagaagggaatactttcaaactcattctacaaagccagtattaccccaataccaaaatcacacaaagacatatcaaaaaaagaaaactacaagccaatatctgtgatgaacattcatgcaaaagttctcaacaaaatactatcaaaccaaatttaacaatacattaaaaagatcattcatcataaccaagtgagatttatcctagggatccaaaaatggctcaacatatgcaaatcaatcagtgtggtacatcctatcaatagaatgaaggacaaaaaccatatgatcatttcaattgatgctaaaaaatcatttaataaaattcaaaatcccttcatgaccaaaaaaaccatatatagatggaaaatatctcaacacactaaaagccatataagatagacccacactagtatcatactgaatgggaaaaaactgaaagcttttattctaagatttggaaagtgacaaggatacccactgtccccaatattattcagtatagtactggaagtcctagctagagcaatcagacgggagaaagaaataaaggcatacaaattggaaaggaagaagtcaaattatccttgtttgcagatgatataatcttatatttagaaaaacctaaagactctatcaaaaaacgattagagtcaacaaacaaatttagaaaagttgcagtatacaaaatcaacatcaaaaaaccagtagcatttctacatgccaacagcaaacaatctgaaaaagaaataaagtaatcccatttacaatagctacaaataaaattaaataccaataaattaatttaaccaaagaagtaaaagatcttcaatgaaaactataaactattgatgaaagaaattgaagaggacacaaaaaaatggaaagatattccatgttcatggattggaagaatcaagattgttaaaatgcccgtactactaaaagtaatcaaagcattggtagggattcaatacagtccctatcaaaataccaacgatctgcacagaaatagaaaaaataatcctaaaatttatatggaaccataaaagactcagaatagccaaagcaagcctgagcaaaaagaacaaaactgaaggaatcacattacctgacttcaaattacactgcagagctatggtaaccaaaacagatggcattgacataaagacagacacatagaccagtgggacacaagagaacccagaaataaatccataaatctagagtaaactcctatttgacaaaggtgccaagaacatacattggagaaaagacagtctcttcaataaatggtgctggagaaactggatatccatatgcagaagaatgaaactagacccctttctcttgccatatacaaaattcaaatcaaaatggattaaagatttaaatctaagtccacaaactatgaaactattaaaataaaaaatattggggaaactcttcaggacactggactgagcaaagatctcttgagtaatactccacgaggacaggcaataaaagcagaagtggataaatggaatcacatcgagttaaaaagtttccacacggccgggcgcggtggctcacgcctgtaatcccagcactttgggaggccgaggcgggtggatcatgaggtcaggagatcgagaccatcctggcgaacaaggtgaaaccccgtctctactaaaaatacaaaaaaaattagccgggcgcggtggcgggctcctgtagtcccagctactcgggaggctgaggcaggagaatggcgtgaacccgggaagcggagcttgcagtgagccgagattgcgccactgcagtccgcagtcccgcctgggcgacagagcgagactccgtctcaaaaaaaaaaaaaaaagtttccacacagcaaagaaaacaatcaacaaagtgaagaggcaacccacacaatgggagaatatatttgcaaactatccatctgacaagagattaataaccagaatatagaagaagctcaaacaactcaataggaaaaaaaaccaataatctgatttaaaaatgggcaaaagatctgaatagatatttctcaaaagaagacatacaaatggaaaacagacatataaaaaaggtgctcaacatcatcgatcatcagagaagtagaaatcaaactacaatgagatatcatctaacctcagttaaaaatggattttatccaaaagacaggcaataacaaatgctggttaggatgtgaagaaaagagaacccttgaacactgctgatgggaatgtaaattagtacagtcactatggagaacaatatggagattcctcaaaaaaactaaaaatagaactaccacatgatgcagcaacaccacggctaggtaaatgcccaaaatagaggaaatcagtatatcagacgtatctacactcccatgtttattgcagcactatccacaattgccaaaatttggaagcaacctaagtgtccatcaatgcacaaatggataaagaaaatgtagtacatatacacaatggaatactaagatcctgtcatttgtagcaacatggatggaagtagagtacattatgttaagtgaaataagtcaggcacagaaagacaaattttgcattttctcacttattcttgggagctaaaaattaaagcaacttaactcatggagattgagagtagtatgatagttcccaaaggctaagaagggtggtggtggatgggtgggggagtagagatggttatgggtacaaaaatataattagatagaatgaataagatctatcacaacagggtaactacagtgaacaatcatttattgtaaattttaaaataataaaaacaatataattggattgtttgtaacacacacaaaaaataaatgttttgggtgatggatacccccttaaccctgatgtaataattatacattgtacacctgaatcaaaatctcatgtacctcataaatatatatatctgatatatacccacataaaaatttttcaaaaagtatttgtgtttaaaatgttgacttaatcagatagatgtttcttagaaaccaagatcgccatcaaaccggtttttcacattgtggttattgtatggttctgtattgtagccacattaaacaatgatgagttcaaatggaaacatacagcctttcaacactggctccaagagatggcatctagaagaaacagactgattctgcagagttctgaagggagcaggtgacttagcaattctgtcttcagtttctctgtggtgagttgagcacaaaaagagagcaaagcctgagattatgcttcatttagtctgtatctctcatcaaaacaaaaagaacaaactgaagagactgcaaacacagtacatgctcactccaagattgagtaagcagttttaaactatgacagccccctcagagggcccaatttattccaaaaagctttgggaatgaaatgggttatttacccttgttgttaaacaaaccagcagtctcttagtcataaaagcattccctccaggtaataagtatcattttctttaatattattgttacgggatctttggggtgttgcttttctggccagaaacctgtggccggtggtgcctttgcccaagttttgctcaggcctactgggctcgttctgcccgctcggcctggcaggctgcactcagttcatgctactggcctgaatcccaagtctccaagatagactggagtcaggcatggagctgcaaggagcatggggtctggccactgtgcagtcaggcatgccagttgctgccacggggcgggcagctccaggtgccagcattggtgccagctttctgcaaggctgcagctggacccggtgcattgcaaacagcttccccagctggcaccagggaatgtggtggtgcccagaagcttggagatgccaagatccacaaggacccaaagagtgagtcacagccctggctgagggagctcccaggtctgggatccccaaagggctacagatcttctctccttctctttgctcacaacatggcaagcgaggcgcatgtttcagccccgtttgtcttatagcagctctttaagcctcaccatttggcaggtccgaagttcttgttctgctaccaggaagaatgaggcatgcagacacgtgaagggtgagcaagacaaagaggagctttactgagtaataaaacagttcagagaagaccgcagtgggcagctcctcttcgttaccagggtgccctgactagtgttcagctcctagcagagagggcagctcctctcagcaggcaggtcgtcctgacaagttttcagttctcagcagagagggtacctctctgcagctggttgtcccgttgtctccagctctccgcagagaggaggccctagagtgggtggctcctttctgcaggcagcttgtcccatcgtctgcagctcttggcagagagggtagtttctctctgcagctagtcgtcctgtcatctctcagtcctctgctgtgctctggctaaacccgggacttttattgccttaaaggggaggaagtgcgcaccaattggtttatgagtggccatgagtgggcctagaaaaggtaccacaggtccccactctggtccgcaggactggaagcccagcccccagccttcaggccctccctggcctgaagatgggacctcacagggacccacccccttctgcccaggagcccgtatgcctcctgccaccgtccatggcacccaggctgcgagctccaagaggcacctgcaggccagcgccgagccaccctcaggcccccactcagtccccccaccccacttacacttgtgggtggccaaggtctggaggaggccaaagtggcagagccccagcatgaacacgctaggccaggctgtgatagtacttgggctcggcctcaacccagctctgagatcaaagctggtgctgggagcaggagagaggccaggcagccagagcaggcacctccgagcctgcaagggcaagtgggggaccttcccaggcccccaggagtgcagagaggcccaggtccatagccccaacttgggccttgagtagctgcagccgcacttggtcatcccgatgtggagtggaccctggggtgggtccgcctggccgtaggaggatgggggcggcgcagatgtctgcctcgaagacgtggggcacaggggacgcactgctgctactgctgctccctcagcctcctctgctgccgccgcccacacctcccccactgtggatggcctgctgctgctattattaacaaatactttcaaataccgtaacttattttatgtgaggaaggattattccctttttatagacgaagaaactaaatttcatggagactaagtcacatggctagtaactgacagagctaaacctgaacccaaaccaactttttcagaacatcatcaatgttttcctgtgctccagttgtcaaacttcatcagcgaaatgttggggtcatttaaagctgctgctttgcattcactgaaacgactaacaaccacaaggaaacatggtaaatttacataaatcatttattctagattttgtgaaataacccaaattgaaacttgacttcctccaattcttgagtctatcataacatccttccagaaatatgcttactattaagatttttaagatattctatatgactataacattattttttttctttttattatttttccattagttattggggtacaagtgatgtttggttacatgactaaattccttagtggtgatttgtgagattttggtgcacccatcccccgagcagtatacactgcaccatatttgtaatcttttataccttgccccctcccactcttcccccccaagtccccaaagtccattgtatcattcttatgcctttgcatcctcatagcttagctcccacatatcaatgagaatatacaatgcttggttttccattcctgagttacttcacttagaataatagtttcctgtctcatcctggtcactgcaaatgctgttaattcattcctttttatggctgagtagtattccatcatataaatatgccacagtttctttatccactcattgattgatgggcatttgggtttgttcacgattttgctattgtaaattgtgctggtataaacatgtatgtgcaagaatcttttgcgaataatgacttttttccctatgggtagatatccagtaatgggattgctggatcaaatggtagttttacttttagttctttcagaaatctccacactgttttccatagcggctgtactagtttacattcccaccagcagtgtagtagtgttccctgatcaccgcatccataccaacatctactgttttttgattttttgattatggccattattgcaggttgaggtggtattgtgttgtgatattgatttgcatttccctcattagtgatgttgagcgttttttcatatgtttattggccatttgtatatcttcttttgaggattatctattcatgtccttagtccactttttgatgtgattgtttgtttttttctcactgattttttgagttcattgtagattctggatattagtcctttgtcagatatatagattctaaagatcttctcccactctgtgggttgtttgtttgctgctaactgttcttttgccctgcaaaactccttagtttaattaggtcccaactatttatcttttttatttattgcatttgcttttgtgttcttggtcatgaaatccttgcctaagctaatgtctagagggtttctcccaatattatcttctagaatttttatagcttcaggtcttagatttaagtccttaatccatcttgaatttatttttgtataaggtgagagatgaggatccagtttcattctcctacatgtggctagccaattatcccagcaccatttgttgaaaaggatgtccttttcccactttatgcttttgtttgctttgtcaaagatcagttggctctaagtatttgggtttatttctgtgttctctattctgttccattggtctatgtgcctatttttatactagtaccacgctgttttggtgaccatggccttatagtatagtttgaaatcaggcagtgtgatgcctccagatttgttatttttgcttagtcttgcttttggctatgcaggctcttttttgactccatatgaagtttagaattgtttcttcaaattctgtgaagaatgatggtggtattttgatggggactgcattgaatttgtagattgcttttggcagtatggtcattttcacaatattgattctacccatccatgagcatgggatgtgtttccatttgtttgtgtcggctatgatttctttcagcagtgttttgttttccttgtagaggtctttcgattccttggttaggtatattcccaagttttgttttgttttgtcttttgcagttattgtaaaaggggttgacttcttgatttgattctctgcttgttcactcttggtgtaatagaagagctactgacttgtgtacattaatcttgtatccggaaactttgctgaattcttttatcagttctaggagctttctggaggagtctttgtggtttacaaggtaaacaatcatatcgtcagcaaacagagacagtttgacttcctttttactgaatcggatggcttatttctttctcttatctgattgctctggctaggacttccagtactatgttgaagaggagtggtgaaagtgagcatccttgtcttgttccagttctcagaggaaatgttttcaacttttccccatttagtattatgttggctgtgggtttgtcatagatggcttttattacattgaggtatgtcccttctatgccgattttgctgacagttttaatcataaagggatgctggattttgtagaatgctttttctgcatctactgagatgatcatgtgatttttgtttttaattctgtttatgtggtgtatcacatttattgacttgcatatgctaaaccatccctgcatccctggtatgaaacccactcgatcatggtggattatctttttgatatgttgttggagtcgattagctagcattttgataagagttttagtatctatgtttatcaaggataccagtctgtagttttctttttttgtttgtgtcctttcctgtttggtattagggtgatgctggcttcatagaataaattagggaggggttcttctttctctgtcttgtagaatagtgtcaataggatcggtaccaattcttctttgaatgtctggtagaattctgctgtgaatcatctggtcctggatttttttgttggtaattttttaattaccatttcaatctcactgctcgttattgttctgttcagggtatctaagtcttcctgatttaagctaggagcattgtatttttccaggaatttatccatctcttctaggttttctagtttatgtgtgtgaaggtgttcatagtagccttgaatgatgttttgtattagagtcgtgtcagtcgtaatacctactgttttgtttcttagtgaggttactttgattttctctcttctgttcttggttaatattgctaatggtctatcaattttatttatcttttaaagaaccagctttttgtttcatttatcttttgtatttttttttttgtttcaatttcatttagttctgctctgatcttggttatttctttttttctgctgggtttgggtttggtttgttgttcctgtttctctatttccttgaggtgtaaccttagaatgtcagtttgtgcactttcagtctttttgatgtaggtatgtagggctatgaactttcatcttagcactgcctttgctatatcccagaggttttgataggttgtgtcattattgtcattcagttcaaagaattttttaatttcgatcttggtttcgttttcaaccccatgctcattcaagagcaggtaattgaatttccatgtatttgaatggttttgaaggttccttttggagttgatttccagttttattccactgtggtctgagagagtgcttgacataatttcaattttcatgaattgattgaggctcgttttatggcctatcatatggtctttcttggagaaagttccatgtgttgtcaaacagaatgtgtattctgcggttgttgcatgaaatgttctgtatatacctgttaggtccatttgttccaaggtatagttaaaatccattgtttctttgttgactttctgtcttgatgacctgtctagtgctgtcagtggagtattgaagtcccccactattattttgttgctgtctatcttatttcttgagtctattagttattgttttataaacttgggagctccagtgttagctgtatatatgtttaggattgtgatattttccctttggacaaggccttttaccattatgtaatatccctctttgtctcttttaactgctgttgctttaaagtttgttttgtctgatataaaaatagctagcctcctgtcagatcagtggcagcattagattcttaagattctcatgggagcctgaaccctactgtgaactgctcatgtgagggatctaggctgcatgctccttatgagaatctaactaatgcctgatgaaaccaccactccccaaacccctgtgtatggaaaaattgtcttccacgaaattggtttctggtgctaaaaaggctggggaccgctgttctatatagctaatcagaagcctttatttaaaaacaaaacatcttagctgataagaaagcaaatgtatttgcaaattaaaatgataattttcaatcaactaatatttggagactttcttggccaaaaatacacagctataagactaatgacttttctcttaatttctagactttacttatgatttgaatgatataacgatagtgataaaatctcaaataagaagcacaaaaaaatcccattttcaatgccacatttatgagattagcatttagaggggggccttgaaatttttttccaatgaatgattcatataaaatattcatatatatttctccaaatttaatttttaatatataatattttcacacaactaaaaatgcaagtatgtatatagtaaaaggtcttctcccactctagttctctatcaagtattttttcttataggcaatcgaaatttcgagggccttgagtatgtttccagaggtgttctatgttatatataacacaaacacacacacacaaacacacaaacacacacacacacattatactatatatactgttctgcaccttgatttttccacttaacaatatatcttagacaatatatattggacatcactccataaatacataaattgtttccttttttaacagaatagccatttcacattcagttaaatggatatgctgttagtatagcctagggtatgttccagtgacaaactatccccaaatctgagtggcttaaaaccacaaagttttatttctagctcatgctatatgtttatcatgagtaggtcaggagttctattccatgtctacatcagtaggccatccaggcaaatgcagcaagctttatctagtcattttggcagtacaaaagagaattttagactcacactaaaattaaatgattccatctaaaagtggcagaagttatttctgtttatggcattggacaaaagggtcacatggccatataccacctcaatagaaccaggaagtgctgaaaacatttgagcatccctaataaccagagggtctatcatacttttaaaatcagttttctactgatgatcctttagctgttttcaattatttgctacaataaataaatactatagtaaatgtgcacatgtcattttgcatgtgtgaatacatctatagggtatattcctggaagtagaattttgcatgcatctttacaagtctacctgtggcacacagcacaccaagaatttagtttctccacatttgacatacactgaacacagattattaagattatgtatttatttttgaggtgggatatgaaagcaaaaagatatttcagtggaggtatttccttcaaagatcccaagaatatgttgtattaattttgattttactaaatgtattagataaagaatattatgtttcttggcctttagctgctttaatatatttagttattatatgtatcttcttttagaagtcttccaatggctgggtgcagtggttcacgtctgtaatcccagcactttgggaggctgaggtgggcagatcacttgaggtcaggaggtcaagatcagcctggtcaacagggcaaaaccttgtctctattaaaaacacaaaaaaattagctgggcatggtggcacaggcccgtaatttcagctactcaggaggctgaagtaggagaatcgcttgaacccgggaggtggaggttgcagtgagccgagattccgccatgcactctagcctgggcgacaaagtgagactccgtctcaaaaaaataagtaaataaataaatgaggtctttcagggacacaatttattacagttatattctctgagccagaatagggaacaagaatagctacaatgttttgtgtttaaatcttattcccaatattctcacaattacttttacatttcagttaagtcagaatcatagtcctggatgttgcactgaaggctaggattagatgatggaatcctctaattatttgtttttactaaatatcccaatagacccatggaaggttgattgtggtatattaaaaaattattctgactatattagtttgggaagcatcaggttaaacaccagtgaactttttaaccacaggactttacacagcctcgtttaatataggtgcagaaactaaatttccgacataagaatacaccagatgtttcctcaaatttatttcaccatggagctaatgttttatgagcttctgcctagagaacctaattcttaaaagaatacatttagataaatattggtttatagtactaaaaccataattcgacaagtagcaattgagcatgaattatattttagtcctatgtaatcattctgtgattacataaaagtaggccaaagtccttgtttcaagtagtctgcaggcttatgggaaataataacacgaaaaatacaagtcactgctatgtatacagaatataaatgagaatttgcctgagacaaaagaattatttaattttcttttctttttttttttttttcgagacagagtcttgctctgtcgcccaggctggagtgcaatggcatgatctcagctcaccgcaacatccacctcccaggttcaagcgattctcctgcctcagcctccagagtagctgggactacaggcacacgccaccatgcccggctaatttttgtagttttagtagagatggggtttcaccatgttggccaggatggtcttgatctcttgaccttgtgatccgtccacctcggcctcctaaagtgctgggattacaggtgtgagccaccgcgcctggcctatttaatttccaatacagaatctgacacatttgttcaagtttttttttttttttttttgagaaggagtctcgctctgtcacccaagctggagtgcagtggcacaatcttggctcactgcaagctctgcctccctcccgggttcacgccattctcctgcctcagcctccggagtagctgggactacaggcgcccgccaccacacccagctaattttttgtatttttagtagagacggggtttcactgtgttagccaggatagtctcgatctcctgacctcgtgatccacccgcctctgcctcccaaagtgctggaattacaggcgtgagccaccgcgcccagcctcaagtgtctattttgatgttcattcactttttcattataaggaagtaaattacttagcacaagagaaaaactttttttttttgcaatctaaagtgttccccagtgaaattctgaggaaacaaatgttatctcagttgactcatggctttaattttactgttttcagatttctccgacagcaatgaataaaacaattgcctgactaaagaggagatatcctctttagataaaacgactgaagacccattaccaaaatagggaaaaagaaacaatctctatgaaagagtttcaaataaaaatatgtaggtgctttggacttttttatttctttattttcccagccatgtcataaatgtttagattgacaaatatctgagaaaaatcatcacataaaaatccccttaaagcaaatgtcattttggtgcaattaattcttgattactctttgacacttgctaagcttctttcagatgaaaaaagtatactcttgttggcatgtcactagtgtaatgccctcaaatatgttaacattattcatgacttcgttcttaagtacattttgactgaattatcttgagtcaggatataaacaaagtgattttacaaataaatgttttgaagggaagtttcttgagatgcttctttgatgatgtaaagtcaaaggtttaaccatatttctttcagcaattatctgaaaattggtttttattcttaaaaatgtacagatatgtctattttatttgcatttattctctttcttttttacctaatgaaaaaaaagtaacagtgggttcttatgagctatttttacaaaggaaaattgagttctcttctgagacaaaactgagctgtaaacatactggtttaaaatttgtaaaaaacaatgtacacacctactttccacctggtacttgccagtaagagaaaagcgtgacaattgtccctatattgttgcattttgaccttactggtcaacagctgtcagctcctgtagagctccatcaagcacctaaacaaatatacccctgccaggccaccttttaaacatatctttccaagtccctagtgatactaaagttagaatgagagatttaacatgtttgtaagtttttaggttctaattacaaatatatgtaatttgttaaaatttttaaatcttattttggtgccactttatttgcccaatttactgctatttgaaatagaaactaatacacttacatgcctttagatgaactctattttacttttataagttttaatctgagccataacatctttgctttgaatatattgtcaacaaaatgagctcattaaataaaactcttctattaattaaaaaggccagtggtctgcccaagtaactaccttatcatttctacacagggtaaacagacattcaatatgttggtaaaaatatagacttatcacaaaaaaaaaataaaggaagaactagcatctagtcttctttagttgttttaagacacattctatggacaaagcatgtactttctgcatcagaatccagatgttggccacaatctagtctcttggagtttcccattgtccccccaaaggcaaagttctgtcaatgcctctcagctggaccctaggcacaagtctagcttatgcccacccaccctgcccaactgtctccttaaaacaggcctttctacccatatttttgttcatccagaaagggaagctatggtaagagtcttgagtaaaatatacaacagaatactttataaatataataaattcaattttattcttcctattgtgtaagactcgggatagactgagaacttttcctgcttctctaacatttttgatccaagctgctttatcctagaggttctcttactctcaggggagaaatagtaggactttgcttttgactgcatggcctaaaagcatggcctggagcaagtctccaagacaagggcaagagaaaatcaacaggacggggaaaagattgagaagagtctgttgctgggtagaaatgctaaactctaatcagagtgccaacaaggatacaatgaaagctggaatgaaggcagagcccactcttaaaggctcttatgcctttgttgaacccataggggccaatgctacccaatcacaaggcttgaaaagggaggactttgattgtgatcataagtgtctctttcctaatatttttacctgtggaaacactcttctgctccaaaagtctggtttgaccctcaggaaggggaaggaattccctacccatgactaagattgaatttcttagcatcctggggggataaagctcagaaccagatttaacttcattttgaacaaataagggaatgtaacatttctacatccctaaacagatacagtgccaaaaaggtcttctccatggcatattatagtcaattttttgaatgtcaaagacagagagaattctaaaagcagcaagagaaaagcatctagtcacttataaaagaacccccatcagattaacagtggatttctgaatagaaactttacaagattggaaagaatgagataatatattcaaaatgctgaaagaaaaagagttagccacagattccatacccagcaaagttatttttcataaatgaaggagaaataaagtcttttctaaacaagcaaaaactgagagaattaatcacaattagactgactctacaagaaatgctcatggggtcctacacctggaagtgaaacagcagtatctaccatcatgaaaacacacaaaaacatgaaaacaactggtagagcaaacacacaaacaaggaagaggaaaagctcaaatattaccaatacagaaaaccaccaaatgacactgaaacaaggagagaaagaaaaaaacaaaaaataaacaaaacaaccataaatcaattaataaaatgaaataagcatcaatgtatcagtaataactttgaatgttaataggttaaatttccacttaaaagaaatacattggctaactggaattttttttttttttttttttttgagatggagtctcgctctgtcacccaggctggagtacagtggcataatctcggctcactgcaacctctgcctcccgggttcaagtgattattttgcctcagcctccccagtagctgagactacaggcgtactccatcacgcctggctaatttttgtatttttagtagagacaaggtttcactatgttggccaggctggtctcaaactcctgaccttgtgatcctcccgcgttggccttccaaagttctgggattataggcgtgagccactgcacccagccctggattttttagtgacccaactataagctacctacaggaaactcacctcacatgtaaagacacatgtagactaaaagtaaacagattgaaaaagatattccattgaaacaaaccacaagcaagcagaagtagctataattatatcaaataaaatagactttaagtcaaaaatagtaaaaagagacaaagaaggtcatgatataatgataaagatatcatttcagcaagaggttatgacaattctaaacataaatgcaccatgcactgaggatccagatatatataacaaatattactagatttaaagggagagagagactgtaatacagtaatagttggggactttgataccccattctcagcattaaacagattatctagaaagaaacttaacaaagaaatattggatttaaactgaacattagatcaaattaacctaacagacattgacagaacatttcattcagcaattacagaatacatattcttctcagtacatgggagattctccaggatagaccacatgttaggacacaaaacaagtctcagcaaattttaaaaaatcaaaattatattaagtaccttctcagaccacaatggaataaaactagaaatgcataaaaagagaaacattgaaactatacacatatatgaaaattaaacaacagactcttgaaagaccactgggtcaaggaagaagttaatgaagaatcaagagcctcttgaatcaaatgaaaatcagcacacaacatgtcaaaacctatgagatacaacaaaagcagtgacaagagggaagtttataatagcaataagcacctatatcaaaaaagtagaaatatttcaaataaacaatctaacaatgcacctcaagcaactagaaaagcaagaagaaacaaaactcaaaattcacagaaggaaagaaataacaaagatcagagcagaactgaacaaaatagagacaaagaatcaacaaaacaaaaagtttgttcatttaaaaagataaacaaaattaataaaatatttgttagaccaatcaagaaaaaaagaaagaatgcccaaataaacataatcaaaaatgaaaaaggagacattataaccgatatcacagaaatacaaaagagcatcatagattattatgaatgactacacactaaaaaactggaaagactgggggaaatgaataaattcccggacacatacaacctaccacgattgagtcaggaagaaatagaaaacttgaacagaccaataacaagtaataagatcaaggtaataataaaaagtctcccaacaaagaaacagccaggaatcgatagctgcacagctgaattctaacaaatatttaaagaaaaactaacactagttttcttcaaactcttccaaaattgaagaggagggaatgctccctgactcattatataaggccagcattaccctgacaccaaaagcagacaggacacaacaaaaataaaaaacctacaggctaatatcactgatgaatgtagatgcaaaaatcctccacaaaatattatcaaactgtgtccaaaaccccatcaaaaaagtaatacaccataatcaagtggatttattccagggatgcaaagattgttcaactacacaaatcagtcaatgtgatacatcctatcaataggctgaaggacaaaaaacatataatcatctcaatggacaaagaaaaagcatttgataaaattcaacatcctggagagtgacaccagcaagttgggtgagtaaagaagcctagaattcttcccccaacaagaaaggaccaagtcaatgaataaacagctaagatttgactagagtgtcaaaggcgtggtgttagactgcaggaggtgagtggagatgcacctgtggtgattgcaagtccaggagagaagcatggaggcaccggcctctgcagctccatcttccccactcagatcagattggcctggactcagaagagacttcccattataggtaaaaggtaagtaagcaaaagattcttaccagcctccattgccacagcagatacctacagtttttacaacaggcaaatcccacagtcctcacaatttctgagaccagtttgaagagctactaggaattcacacagctgcattgccctagattaggaacacaaggtgtgtggcttcccaccctgacccaatcccctgtgagccaagctgctgcagatatctctttgatatattgatttcctttcttttggatatgtactcagaaatggaattgctggatcatatggtgattttatttttagtgtttctgaggaacctccgtactgttcttcatagtggatattctaatttacattcccacccacagtgtacaagggttcctccttctccattttctcaccagcatttattagataataatctttttgaggaaggccattttaactggtgtgagatgatatctattatagttttgatttgcatttctctgatggttagtggtgttgagcaccttttcatatacctgttggccatttgtttgtcttcttttgagaaatatctagtcagatcttttggttataaatcccttgtcagatggatagttagcaaatattttcttccattccgtggattgtctcttcactttgttgattgtttcttttgttgtgcagaagcttttcagtttgatgttataccatttgtcagttttcggttttgtttcctgtgtttttaaggtcacagcccaaaaatctgccaagaccaatgtcttggagcatcccttcaatgtttcttctagtcgtttcatagattcaggtcttagacacaagtctgtaattcattgtgatttgccgctttttgtgtatagtgagagataagggttctatttttattcttctgcatatagttatccagttttaccagcatcatttattaaagactgtcctttccctattgtatgttcttagcaccttcattgaaaatgagttggctgtaaatatctggatttatatctgaattctctattctgttctattggtatgtgtctgtttttatgccagtctcctgcttatttggttactatagatttatgttaaaatttgaagtcaggtagtgtgatgcttccagctttgttcttttggcttaaaattgctccacctatgaagggtcttttgtggttccatataaattttaggatgttttatctatttctgtgagaatatcattggcattttggtaggaattttgatgaatctgtaaattgctttgggtattatcattttcacaatattcttctaatccatgagcatggaataacttcacattttttgtgtgtgtcctcttcaatttctttcatcactgttttattggtttttttaaatagatcattaacttctttgattaaattgattcctatgtattttatgttctttctttttcttctttccaacttttattttagagtcaaagggtgcacatgcaggtttgttacgtgggtaaattacatgttgtgggtgtttggtgtacaaataattttgtcacccagataatcagcatcatattcaataggtagtttttcatttctcatcctcctcccaccctccaccctcaagtaggccctggtgtctattgttcccttctttgtgtctatgtgtactcaatgtttagctcacatttataagtgagaacatgcaacatttggttttctattcctgtgttaattctcttaggatattggcctccagctctattcattttgctgcaaaggacatgatcccattctttttatagctgtgtagtactccatgatgtatatgtaccacattttctttattcatccgactgttgatgggcatctaggttaattccaggtctttgttattatcaagagtgctgtgatgaacatacgcatgcatgtatctttatgatagaacaatttatattcctttaggtatatacccagttatgggattgctgagtcaaatggtacctctattttaagttctttgagaaatcttcagactgctttccacaatggctgaactaatttacgttctaaccagcagtgtatacatgttccctttcctccacaacctcacaagaatctattattttccactttttaataatagccattctgactggtgtgagatagtatctcactgtggttgtgatttgcatttccctaatgattagtgatattgagcatttattcctgtccttgttgcccacctgtatgtcttcttttgagaagtgtctgttcatgtcctttgcccacttttttaatggggctgtttggtttttggttgttgatttgtttgcaaatatttttctcattctgcaggttgtgtgtttactctgttgatagtttcttttgatgtaccgatgctttttagtttaattaagtcccacatcaatttttgtttttgttgtaattgcttttggagtccttgtcatgaagtctttggaagggctaatgtccagaatagtatttcctacgtttccttcttggatttttatcgttttgggtttgacatttaagtctttaatctctcttgagttaatttttgtatatggtgaaaagttggggtccagtttcaatcctctgcatatggctggccagttatcccagcaccatttgttgaacagggagccctttccccactgcttgttattgttggctttattgaagatcagatggttgtaggtgtgcacctttatttcttggttctctgacttgttacattggtctatgtgtctgtttttggaccagtaccatgcttttttagtaactgtagccttgtaatatagtttgaaattgggtaatgtgatgctcccaggttcgttctttttctttaggattgctttggctattcagactcttttttagttccaaacgaatttaagaatattttttcaattttgtgaaaaatgtcattgatagtttgatagaaacagcattgaatctgtaaatgtctttgggcagtatggccattttaacaatattggttcttcctatccatgagcatggaacgtttttccatttgtttgtgtcatctctgatttctctgaacagtgttttgtaattctcattgtacagatatttcacctccctggttagctgtatttatagatattttattattttggctattttgaagccacaaaagcattagtagcatttctatacacgagtaatgcccaaactgagagccaataacttgatttggctctcagcttggacattattgatgtatagaaatgctactaatttttgtacattaattttgtatcctgaaactttgctgaagttgtttatcagatctaggagcctgtattagtcagggttctctagagggacagaactaataggatagatgtatatataaataaacgggagtttattaaggtgtgttgactcaggcaatcacaaggtgaagtcccacaataggccatctataagctgaggagcaaggaagccagtccaagtcccaaaacttcaaaagtagggaagccgacagtgcagccttcagtcagtggtcaaaggtccaagagtccaagagctgaagaacttggagtgtgatgttcaaggtcaggaagcatccaacaatgtagactggaagactaagccagtctagtttttccacgttcctctgcctgcttttatcctagccacactggcagctaattagatgatccccacccagttttgagggtgtgtctgcctctcccagtccactgacgcaaatgttaatctcctttggtaacactctcacagacacacccaggaacaatactttgcatccttcaatccaatcaaattgacactcaatattaaccatcacagagcctttgggcagagactgtggggttttctagatatagaatcatattttctgtgaaaaggaatagtttgacttcctcccttcctatttggatgcctgttatttctttctcttgacagattgctctggctaggacttctggtattttatattctttgtaaattgtagctattacaaatgggattgcttacttgatttcttttttagattgttcactgttggtatgtataaatgctactgatttttgtatgttaattttgtatactgcaactttactgaatttattagttacaacagtttttttgtgaagtctttatgtctttctaagtataagatcatgctgtctgtcaataaggctaatttgactttttcttttatagtttggatgcccctttattactttctcttgcctaatttctctggccaggacttccagtattatgttgaataaaactggtgaaagtaagcattctagtattattttaaatcttataggaaaggtcttaaatgtttccccactcagtacaataacagaccctttaaggagacgtgatttggagatacaggtttgctggaaacaccacaggaggagaaacaaagaggtgcagtcatcagatgaaagccatatgaatatcccaggtgggggctggcagtggatatgtccaaacttagaagtgaatcacgggagctttaaaggcttgaacccacttcaatagggcatgttggagccacagcccatccctaagcacagcactccagatcagcaactatggatgaggtgactgtgacctccctcaggttgcataagtagggatatatttatgcctttcaagatgctgaaggaaccagcaactagaggagagaaaagggaaagctccataaagagcaaatcatgccgccttcccgaaggaaaaagactgggactggatagttggatcttgccaatgctggagtcatgggaggaatcttcaaattaaatttgcgagttaattttttaaaatgaacagaaatgaatcctttaaaacaaaacaagccctggcagggtcattcatgcctataatctcagcactttgggaggccaaggattaaggactgcttgagcctaggagtttgagaccaacctgggcaacatagtgagacctagtatctacaaaaaataaaacaaattacccttcttctgtctgcaacatctctccagctgacaaaaacacaggggatccatcaccttcacctcccagaaatcacaaacagcgctgacctccccctggccccactcctaacctggcagtccctgagacagcaggtcacccaattcactttccccctgtttagggagaataagaaagattgacaagcccctgcttaagcagacatttaaaaaataagtatcaatcttccttttctttagacagcaccaaaacttatgaagattcttttggcacctccagctctttgggttgctgggagcaaagcatctctctctccctgcaaaccaccttctaaaacaggctgccttttcccctctgtgcaggcaggcatcaagtacccaaagaaaacagctggctctgagtggtctctctctagttagccttttgggaaatagttggccttaaatatagatgctttcttgaatttaaaatttgaaccatataatgacttttgttcataattttgagccactgaaattccaacatgaaaaattccagacaacattgtattatttacacatatataatcagttcaaaaggcatttctaaaattgttctaattgtgataacataatctccatttaagcaatagattgtcctacctgagaattccaagaagagaattgaagtgaacctgaggaaagaccatgggacttccacctgcatgttatgcagaggcagcacttaacaatgagtcctctgaggttagaggatttccaggctctgttagaggattattgttctatttatgcttctcaccatttcaacatatgctcagcattggttttacagggaccatttatactttacaaactacatccaagaataagagacagaaagaagttgtaatgaaatgcaaaatattatgattctcaaattgtctggattgagctttcaagaaaacatgcaaaaaagcagcaataccggctaatcttcattcctaaaacaatcaagtgataacgtttttaaagcatcataatttgaatgcccaaagatttttttaaaaaaattcagctttacttattttgcttctttctgctaataaaataaaaaggatttatttagtgttcattcttcttttacaaagtttgaatgactgtaggaatcacattttgataatttcttttgactgctacttgatttgatctgagactatttatttatttattttattttattcatttattttgagatgagtgtcgcccaggctggagtgcagtggtgcgatcccggcccactgcaatctccgcctcctgagttcaaacgattctcctgcctcagcctcctaagtagctgggactataggcgcgtgccaccatgcccggctaatatttgtatttttagtagagatgaggtttcaccttgtttgccaggctggtctcaaacgcatgacctcaggtgatccgcccacctcggcctccaaaagtgctgggattacaagcgtgagccacccctcccagcctgagactatttattttaaccatctacttaaataaaaatgtgcaggacaggccattagatctcatcattgttccactaactcatcattttaaaacagcttcatctgagcttgggaaacactgacttatgttaagtaatagcctccctctagtggataaagatgggaggagcagactgagttttttttggtttttgttttggattccccaaaagctagactttgttagattcaatttatcaaggctccagcaagcaatgttgaacttctttgtggtttaatttcatctgcattgttgtattttatttccattatggttctcttcatccttgaagtcattcagctaataaatatttattggatacctgcgatgtgtcaggcacggttccatgccctggagatacagcagtgagtgaacaaaacaatttgaaatcctgtctttgggaaacttaaaacaatattagattgttatcatcatgtgctttctacatgccagactatgtacttagttgtttgcaattattattaaattgagtctttccaacagtcatgtttgaaaactgagaagctaagaaacttgcccaagatcacacagaaactgacggaccagaacacctcaggaacttctctgaccatgtggtcaattacagacaacccagtaattctgagtggccctgtcttgattttcattgtgttatgctttttttaattgtctgcttctccaactaacatcattataaccctagcacctgaaaccttccactgggttctccagaaacacctggttaaatgacttaaggataatgaaataaatgaacaaagagtcaaactctggactatttgacagcaaagcccttctcaccgatgtctccactgcctgcatgagtgtccagaaaacagaaagcaaccccttcctggatggctcagttgaattatttcagagctatatgtcgactccattttcttaaagagtaggtgaagaaaatgagtctaacataagtgagatctgattctgtggaagatttttaaatctttagcccttttcctgtttagaaaaaaaaaaaagtgcagctcgctgccagtgctcattttattttacataaacttgctctttgaggctgaagcaaatctcactgattttcaacatgaaaatacaatgtaaaaattgttctttgaattatctctaaacagaactaatatgaaaactgtctgaatcattaaaactattttggaaaaatctgattcatcaaatgaatctttggccaacaactgttcaagaacaacggtaggaataccatgtttttttaggatttgacattttcagtgaatgagaattactgtattttgtacatggaaataccacctctaaaaacagaatgctataaatagaatgatggattttgcttccaaagtcactatactagagagatgtgaaaataataataaaagtgagatacttcatggaagttatctcggagtaaatgctgcagctgtcagcgccactggcaattactctcagggagaatgggaaaggggttaaacaggttctcatttgccaactctcctgggttttaccactagaagaatcagggagaagctaaaggtgccttcaacttttggaggaatgtattcccctgaaagggcctattctgctgtgggcagcaggaacttaccagagaggaatagattcaaaacccgctagagatatcatctattggaatttggcaatgattaaagagatggtgatgcaggaccagatgtgggaatgagttcttttggggacatgatgaactttaagcaagtataggaagtccaggtagagatgcccagagggcagctggaagagccacctgagtttgggaagggagaattaggaagattaagagttatctgctgagagatgatagttgacattgtagaagaggtgactgcagaaaggcaggaggataagatgatttagaaacaatttttccttagaggatcttcttagtgtggatccaacctattggggaaagatttatcaaggaagttgttatatgagctggacagaaatgagctgcccttgcatgtgcagcaaaacctgctgtgagtagaatctaatgccagtataaaggagcccgtttgcatggtactattttgttattctatagtagttatttcatcaatcattatatgctctataccattacttgccactaaccaagtaacttgagagtgtcatagctatcattcaaatctattaatctttcttggtgtgtttaaaagtcattagcgttctggccaattgcagaatagtaaatattgaaagagttgtcttaccatttgaagtgttttctggctacaataaatatttgttcaggttgtagcactgcctgggtaatcactaggtaaaaaggcaggatcaacttccagtgctagaacaagcagaaaaaattactaggtgcaggaacaggttttatggtggatctctcttaacctactctttatgtttgaattttaaagaggaattatcattgtctgctcacattacacaatgcacagtaaaacaaaccaaaaagaacaaatgaaaaagggcttattttaggacaacagttttaaaaaacaaaacaaaacaaaaaccaaaacagggtgatcctgaatattgcaaatcaagaggcccagcctgtcatccaaacctcattaaattcacagaagtggttcttccctccttgtcaagctttttctgtacacggagttttgaaagataagcttgccaattgattctctgcagttctttcttcatctcaccctgattgttttctccagtcagattagggtgataactgacaacaaacatcttaattagagaggtcaagatatcagtttctggtaggttaaaatgctcttagagtcactatttttattttgcatgtaacaacctctttgataaacctttcttcaagaggctagattcacactaagtagatgctctgaggatccttcgtctctgatttcatctttctgctttagtgcaaacacctgtcctacagtgttaactatcacctctcagcagacaactctgtcttcctaattctccttcccacactcagttggcgattccagctgccctctggatatctctaccttaatttcctactcttacttgaagctcagcatgtgccaaaaagaactcatctccaaatctgctcctgcaccacaatgtccctaatgattgccaaaatcccatggatgatatctctaccaaggatttttgatctgtccctgtcctgtgagttcctgctgcccacagtcaagttgccctcattcatcatttcttggactattataaaagccttttaactggcttctattatttctgaatacacttctgtctgcatgctgccattcatcaatctctgaatccggtgtgcaagttgccattaatctctctgctgttcaacagccttgagcagcccagcctggcatccaggaccctgtgcaatagggtgtctcccaatatgttcttaaacctaagtgcatgctccctaaaccagagttctcgcccttccctaaactaatcagtctttccctgtctcccagggttttcttatactatttcttcttcatgatatgccagtcacatctctatctttctggatttcatccattctttaaggccttcaagttcaaaagccaacttttccacaaagtatttccaattcctcctgggagttttccctccaaatctttatcacacattgttgtctaatttcatcaaaccttccttattttttttcttggtattagggttattaatataatttttattaatttataatgttttatttattaataagacacattaatttatgtgtcttcttccccctatacccacacacccccatgctggatgtggtacagcaatgaggcgtgaagagaaaataagtctcaggaccactaaatcactaagccaaagggaaaagtcaagctgggaactgcgtaacaggcaaagctgcctcccatttaattcctaaataagatggctacaaagatttttaaaagctacatacctctctcacaattttctcactaggagattccttgtggtccccaagatccttaccctaaaacagttctgtcgaatttcacactgacaatgtaaattgatagatacgggagaaaggatagaactcaaagtcatccctcagctcaactgagacaaatgcatatctgattgcttcctttgccctgtgtttattttatcttatgtaaaaatgcaggttcactgagtcagataaatgcaaaagtgactattctggccgggcgcggtggctcacgcctgtaatcccagcactttgggaggccgaggcgggcagatcacgaggtcaggagatcaagaccatcctggctaacacggtgaaaccccgtctctactaaaaatacaaaacaaaattagccgggcgcggtggtgggcgcctgtagtcccagctactcgggaggctgaggcaggagaatggcgtgaacccgggaggcggagcttgcagtgagccgagatcgcgccactgcactccagcctgggcgacagagcaagactccatctcaaaaaaaaacaaagtgactattcttctgcccacctctcacatgtgaaaggctgatcaaagattcaaaagaatgcaaccatttgcctcttatctactcacaccttttaaatatttttcccctttctccactacccttccccctttaaatattgaagctctcaaaatcatctttgaagaaaggcacagacctgtcacccaggtgcatgtccttaactttggcaaaataaacttctaaattgattgagacatatctcagatacctttttgtttacacaggaaaaagcaggtgctttgaatcctaattctaacacctatctgcatagtcaggagtagtttccttatccattctagacttatttttttcttatttgtgagaagggagtaatgctcaactttttcaaattaaattaaatcatgtatattaactaccaggtactcactaaatgctcctcttattaactataattatccagagggggagcactcagccttctcatctccagacccctgcaatgccctgcccatacctccagaaaacaggtgctcagaagcttggttgaactgaaggaatttgtctttaggtgggtccctttgcttaatacttacctcagaatttagaagcagtttggcaagccctgtgctgattgatggagcactaaaggatatttccccattaaattagtcagacttgggtttcagctggatgaaaatggcccaattcttgcccaattattataaagctgctgttggtatgatgaagcctagctgtcattatgtttcagaaaagatgaaggcatgtgacaagtaagtatttaaaaaagtgaaaacacagtaaatgcaatgacgcccaaaaacctcaatcctggtttccaaggcagaaagtggcactacactgcgtcctctaatggcttctgggagtcatttagctgagaggtctcaaattttggtctcactggaggttcctcatggaaatgactggggagagtaaaacaaaataagaaaatctgtattttccagctgtaacacatggccaatcatcagacagataaatcagaccgtccccagtcccgatgtggtacaatttcctgacttaactccatttgtagtgattctcacaggcagggaggttgcggtacagatagaaaggctagaacgaattttcccttatggaaacatttcaaaacaatctaggggtagccttcactgccagtaattctgagaatcattctttaaagctcctataaattagtggctttatggtgattagctagcaagtaatgaatacaagacagtgattaaggaggaaaggtttatgcccaagcaagaaaagtcacaaatggggaaaagttgtctcaccaaacatccaagccactgtttcagaagttttctagctggtaccatgagtttaataaagagaaaataggacatatagttgctttatgacagtaaaataaaaaagtcattcactgatcaacaagtactgtatttctctagtacatatgcacaacctcctcctccatacttccagcacaagtgagcatacacacacacacacacacacacacacacacagctttctccaggtctgccaagggtgcttactctgcaccaattgccaagaataccttgttctctacagaagctgagtgtaatcattatttttctatttgtctggctatctacctgcctgtttcttgccctgtttcaaaaaatcattttagatggctatatggatatataacataacaagaacttaaattagaagtgagataaaaatagaaataaaaacaaatcaaagatgaaaacacagcagacagagaaataactaaaaagcataatgctccacacaattgctaccagggaatcacaaatttgtctataagttttccagtggccacatttgaagagaaacctagtcaattacataattctggtctataagagagattcccaaagttttgtgtgcatctgagtcacctgaagagcttataaaatgataaccataatttcaaattctgtagctctgtggtaggctcctagaatgtataatttaagcaagttcccattgaccttggagatgaacacataaggactcgggaaaagaacagtttttttttatattaaaatcttaaaatcatagtgaactttcttctagggagtaacaaagagaaccttgtgagatacaatgaacattcttacagtgatgcaaaatgagtttcagaggtcactggctgctgcttacaataacattcaaataggctttcacagagctttgtaaaagtaattatattgagatttggtgaaagtggaaatgagggcaaactatataatagtgtttcccaggaacttgatttttgccaaattggcttgacccaggataggaactaaaaaggactttataactactcagtgtcaactttataccaagcaaaaaggtaagaaccccttagtaactatcccagcaaagcatacaagcttcaggtcagcaccgaggctgatctacaaactataatgtggttttgaaggagtgtaatctaattaatcttgtctttaaagtttattctccttcagggctttagttgtgatggagggaggaggcagagagagcctgaatggaagggactgagtaaatccccactatggggattgctcttcgtgaagactgttttagtgggctaaaacagtctttagcccactttagtgaagtttgtttttagtgggctaaaatcatccaaatttctcagtatgataaagttgtcaatatagatgcattttacataatcatttaaatttccttcatttcagttttatagcagaaaatatttgttttattatatttttcacatctcatatctgtcagtttgatctgaaatgactgcaagattttggggtgcttcatggggttttgttttgctttgttttgttttttaacaaatcaagtattatatgagctggtcctttatgtgaaaaggagaaaatctggactacttttagactatctattatttgcaggtgcgcataaaattatggccctcaaacctgagtataaaatagcataagagagatgctattagatattaagatttcattcatttattcaacaagtatttataagaacttggtatttgccaagcactgtgccagataattagagtacaagaatgagcaaaacactgcctccacagtgtttatagtcatgtccttacaggcaaaatgcaattataacatagtgtggtaagtggtctgaatgaagaaatgcagaagactcaggagaggaaataaacccacccttgggttgtcaggaaaggcttcttgaaggaagtcacagggaaggtaagaccaaatatgtaggtaatatacaagtggaagttagacatgtgtgggtgggttcagtgtgagttgggatggggttcaaaatagaaggtggaagagggtatggtctgacctctgtatctgcaggctgtgcatctgcagattaaaccaaatgcagatggaaaatatttgagaaaaacaaccaacgacaacaacaaaaatacaacaaaaaagaatgatacaagcttttaaaatacagtatgacagctatttacatagcatttatattgtaatgtaaccatccaaggggttcaccttgcctgctgcctacatacagctgatttatcaagactggggaattgcgatagagaaagagtaattcacgtagagccagctgtaggggagactggagttttattattactcaaatcagtccctggagcatttggggatcagagttgttaaagacaatttggtgggaggggaggggcattgagccggggggtgttgatggggcatcactgtcttcttgcactgagtcagttcctgggtggggggtcacaagatcagatggggcagtttctcaatctgggtggtgctggctgttcatcaagtgaagggtctgcaaaacatctcaagcattgatcttaagagcagtttagggagggtcagaagcttgtagcctccagccacatgactcctaaaccataatttctaatctcgtggctaatgttagtagtctagtccccaggcgagaaggaggtttgtttggggaaagggctgttatcgtctttgttttaaactataaactaatttcctcccaaagtaagttccgcctatacccaggaatgaacaaggacagcttggaggttagaggcaagatggagtcatttaagttggatggatctttatcactatctcagtcataattttgcaaacgcagtttcagtattaggtattgatatggtttagctctgtgtacccacccaaatctcaccttgaattgtaatctccataatcctcacgtgtcaagggtaggaccaggtggaggtaattggatcacgggggcagtttcccctatgctgttctcgtgatagtgagttctcatgagatctgatggttttatatgcatctggcatttcccctgcttgcactcgctccatcctgccaccctgtgaagaaggtgccggcttctcctttgccttccgccatgattataagtttcctgaggcctccctagcaatgcagaactgtgagtcaattaaagctctttcctttataaattacccagtcttgggtatttcttcatagcagtgtgagaatggactaatacgggtattataaataatctagagatgacttaaagtataaaggaggatacctatagactatatgcaaatacggtaatgcctaaccttgtttttactctaactcgttacttttaagttttccctgcttgtctccttagttacccagccttgtttttcccatacgagtaagactttctcttggctgggaaagccggacaaactccatttggcttcttgatgtttacaagacattaagggctccttacccaacccccttcctcaaggagttaacctgtgtaagcagatcagcatttcaaaggagcccaattgactgatgaggtactgaaacaaacaatgtaagaagttcccaggattttactcaaagaggtaacaacataaagccttgagactgtgtccggcatagcatctatatctaactctaataaaggacttagagccccacacctggttccactgtttttttgtaaccatttgtcttttaaattgtttatctctctgtaaccatttgtttctttgattcttgcatgtttttacttctgcagaattattgcatttgagttcccctccccttcctaaaccaaggtataaaagttaatcaagccccttcctcaaggccgagagaattttgagcgttagccatctctttggccgctggcttaaataacggactcttaattcatctcaaagtgtggcgttttctctaacttgtctgggtataacaatactacaccattttatattgggcatttgagcatctgcaaattttgctatcaaccagaggtcctgggactaacccccaaagacaccaagggaggactgtattacctcttacccctcaaaaacgaaaaaaaaaatctcagcttgttgtgaaggttcacagcagaggaaggaatgctgctgcagctgaaagaaatccagtctgaactttatgtcagtgcgtgaagctggaggtgaaaaccctgagatgaggagcgggggatcaagcctgatgaccttataatccatattaaggaatttagacttcatcccaaaactgaggagccattaagctggtgatcactgatttgcatttagaaagagtattcgaacatctacagccctcacacctcacctttcatcatgtgtaaagtcagatgaatgataaggggttaacacttgaaactctaaggtagtaaaataaattcagaatggagaacgctgtggtaggaaaaactcaagcaccatgcacaggtgcacaggtcctcactgccctgagtctgccaactctgaagtgaccagacaagttgctgccactttgaagtcagggatatgaaggtacgttgccagttatgagaaactaaatcaatgataatgttattacatttttcctcaacataacataaatagtaattgtatacttctcttatattgttcctcacaaaccccacctccattactccatcatgcaagcaaacacaatttctaagaaaaaagaaaaggaaagtggacatatagtagtgtctaagcgccccctgccttgtacccctggagatacaagctcccaaatgtttttattagtgagtcaattatttaacagggatattgaaattatttgtggaaaagtgttctcagatgtgataacaaaagacaagtattttattttctatatgtttgtgattaatgaacatcttttaacagctgaacctggaaggcaactgaaatccaggccatagtgtgtacagggcacctatggctctgctgaagggaatgtgagttaactcacgacccagagtaattcaatttatgaaggattcccttggttttaatactattttactaaactcaaatattggctaatgaggttatttgaagaaaaaaatagtgtttcagaaatggaaatacttaatacaagatgattccttatgtgtagtttgtcatctagtgttaatttgtgggaattaaaaaaggcaggtacaataatatccaaggaggctcatcaggtagcaaagcaacattttaattttaaggtatcaagttgtgtcctaagaccctctaagcttcctggaggtggatgagtaggtgggtatgtgaattggctacttttaagaaatcaagccagacacagtggtccttgcctgtaatcccagcactttgggaggctaaggcacgaggattgcttgggctcagaagtttgagaccagcctgggcaacacagagactacatctctataaaaagtaaataaaaacaaaaaagccaggtgtggtggctcacgcctgtagtcccagctactcaggaagctgagatgggaggattgcttaagcctgggaggtcaaggctgcagtgagccatgattgggccgctgcactccagcctgggagacagagcgagatcctgtctgaaagacaaaaaaaagttacatccaggaaacaaaatggttctcaattctggctgcttggtatcacctgggaaacttaaaaaatacagatggccaggtgaccctccagacctggtcagactcactcaggtgggatgccagcagtggcttatctataagctccccaggtggttctaacgtacagccagcaggaggaccactaggcagggggttaagactgtgcacctcagcggtgtctctgcagaagtgtcattgcttagctatgtcaccctgagcagggaaattgggctaattaacatctatttgcctcagtacaaggaggataatgatgtttcctggggttattgtgaggtttaagtatgatcatgagtatcaagtgtttagcataatgcatggtacattgtgctcagcaaatgctaaatatcattaataacattttatcaaggaaaatatttcatgaattacttaaactacctaagggatatgaaggtattatataggacatactggaagtaagaacatattacctatggcatatttccattcttcttaaacaggcagcctgctggggttgaatgctgatacccagctccatctgagaagcttgttacttcttttccagtgcttacttacctaaagtgctttataacacattgaattattcccaatttttcctaatctctgtctttgggttcaaaatatcaaatgccctagcaaatttaatttgtccttttgggtcagatatcctttcctgaattaaacaaggaacagagccacaccatctacagatgtggtgacagtcagcacagtcctgtttgttggggtcaactcccagagaaaggagaatcactgtaacttatagtaaacttcacaatcataaaaaagtaatctattattagtgtagactattctgggcagaatgacggtcatctgaaaaggctcagaggaggccagtgaagagctagtgttccagtttggttggacaattgaaacatgacttatgacaaattggatatgaagactagggaaagagaaaactcaaatatattaggtgctaatttgaaagggccgaggtgaatgctgcagtatagtagtagaaaagcatgagcaaaaaatagaaatatattgaacagatcaagtatgggcaggagatgcagggggagaattcagatgggaaatatgggctgtaggtcaagactggggagtcagtagaaaggatgtgatggttgaaatcatggggcttgcatgggtctcctcagagtgacttgacagtcagaaggtaaaccaccaaggagagcactctacagaactgtattatcaccagagaagaaaagtcagcaaaagaaacaaagaaaggaacaaagaacatttcaacatgggatttttttttaaaacaaaacaagcaagggggaaggactgaagagaggttaagttcaaagcagaaacaatttggcttctgtaaattattaggatatcgttggtgatatcaaaatgtgcagaaccattggaagttagagcttcagccagattgcaatcatccacattattgcgtgtaactggagtctattttttcattgctacagaacattcttcatgtgattagaccacattttttaaaaaaaatccattctgttggccaaggatgattaagatatttattggtggctgggcgtggtggctcatgcatgtaatcccagcaccttgggaggccgaggcaggtggatcacgaggtcaggagtttgagatcagcctggccaacatagtgaaaccccacctctactaaaaatacaaaaattagctgggcatggtggcgcacacctgtagtcccagttactcaggaggctgaggcaggagaatcacttgaacccaggaggcagaggttgtggtgagctgaaattgcgccactgcactccagcctgggcaacagagtgagaccctgtctcaaaaaaaaaaaaaaaagaaaaaagatatttattggtatttactggccaggttggtgtgagacagaggaaattgcaagtcatacttgtctgaaaaatgtcatctattctcttacttaaaggctgaatggaatccagttacaatgaaattatataaggatttgggaggaaaccaaatagttgaatattaataataatgcataatttgccaacataaatcagcatcaacatctttgaaatgtgactattgaaatgagtaaaatgttacactgtatctaaatatatcagatatctgatgagagtgctttttgggaacagtttcttctctcttagggagtttaaagcaaattaaaatacataccttaactaagtgctttggaaaatatatttatcgcagaaatgcctacaataagcaactctatctggcagtatgttaatgtgaaatatacaaaatataactagactgtttttacttcaaaattcacatcatcatgaaaaatacagcaaaagtacagaatggtgagctcattatgtatctactctatataataactaggaattgatgacttcaaaatattcattcttacaatgtttaattttgattgctaactgacaagcacggtgctaggtgttatatgagcactgaataaaacaaaaaagtttctctgcaaagaaaaaaaccttggtctaggaagtactcaatatatccttacaaatttaaatatggcttttgaaaccaaacaatttttttttccaaataggtaactttctaagcgagtgtctaggcatacatatatatagcaagtcaaaatttcagaccattgatactcagaaatgcaaaattgctaactatttcagttgatgttatacttatttcatcaactatactttttgtgtatttttcctaaagctcttacatgcaatttttttaaacaatgaagtaaacatcatgtctattcttgcaaacctagccatagtaaaatatgaaacaagttcaaaattcttaatctggacaaagacaatttaaactaagcatataatacatctgaaacacgtatccacagtgagtcagcaaatctggggaaaagcaactgtgattgactatgaggctgctgtaattaatcttcatcatctcattgaaaaggtgctacctgaatttctttggctatcctttctgctaatgctgtacaatttgcagcaattattctccgtgacattaaatggaatggtccacctaaaacaaatcaagtatggtaaatagttatatctggtacaaaaataatttatatcaaacaagtacagcaatgtgcactatggtcaatcacgacattttaatactttcagttttcttttaaaaatctactgtcacataactacaatgtttaagctttggcaatccatagctgagtttctaagtatatgttttttaaaataccagttttttggtatttactggcaaggttggtgggggagagagggagtctcaagtcatgctagtctgaaaatgtcatctattctctatttctttgtttgtgtgtgtgtgtgtgtatatacactgttattacctctttactgtttaagaatctatggacagaaaatgtgactccaattaattttcataccactatccttcccatttccttatttctttgttgcctttctctcagatcactggtgaattctttgaacccaggttcactcttcacttcaaaaatttcaccatcagctcaaagcaaatatttaacttctctagtcccaacacagaaggtgatggtggaggactgaagtcaatcatcaactatcacaatggtcagcattcaaagaactctaaatacaagcctcagagtcagtgactctctaggctttctcaacagcctttcaggagttcctattactcacatttgaaaaggcttagccatttatcactatcagtcccatattgccattagttctcatccttgcctctatctcctaatgtttattttgattttgcacaaaattatatagcctgtttgtcttaaaatccaagctatcatatgtatcaaactttttttaaactccatatacagaggaaagtccaagagatgtaaagggaaaaatgattcactatctcataattttaccagtaacatccattagcacgccaccagcttcagtaacaataatggcagctactgcaatatcccagcagtgaattcccatttcataaaatgcctctgctcctccacttgccgcaatgcacatattagtagctgctgttccaacactctggatcctcaaaaatagtattcaaaaatggcagattgaaaaaataacctttcaagtaaggtattcctcctaacttcagtttgaatgttgattgagataagttgaaccaatctagagaataaatgtaaaaaaagatggtatttaatcttaaaataaaaatatataaaatccagttatcgtgatatactatataaatcccaaaactaatcctcacaaagcaataatttaataagataaacatgaaagcaataattttgcagaaaaaaagccctaaaaataatgctataattctactataacagcatgcaaatatattcatatttttttaaacccaaggcaaccacagcttattttacacagatacacacacacatgcacacatacacaatgcacaataatctctagggagcataaagtatcatgatattgatcattcccaactggatgtgcatcatatctagacctaaagggattgcaacccacctgggttctgcacaaacctaggcctctcttgaaagattactacaggtttttcctctcatagcacctcttccttgaaaatacagcaaggtaagatgaatgtgtaagatataagtaagaataagtaagatactacttgatagcaattatagtaataacttattcagtaaagaatcatcagccgggcgtggtggctcacacctgtaatcccagcactttgggaggccaaggtgggcagatcacaaggtcaggagaccgagaccatcctggctaacacggtgaaaccccatctctactaaaaatatatattaaaaagaattagccaggcgttgttgcgggcacctgtagtcccagctactcaggaggctgaggcagaagaatggcgtgaacctgggaggcagagcttgcagtgagccaagatcgagccactacactccagcctgggcaacagagcaagactccatctcaaaaaaaaaaatcatcaataaatgttaaaattaatgggtaaaagtttgatatttttggtatcaaagtatctctccacaagatatataataagtacagtgaggaaaaaatagcatttttacaatgatctatctaccattaccaagtaatcaaagttaatatcacccataataggacaaaaagataccatgtgcctcctgatatgatgcactgagaagtacagaacattacttctgtgacattcctgccaaaaattcataatccaaatgtaatcataaataaactagacaaattcaaatcaagagatagaccacgaaataattggcctatacttttgaaaaatgtcaaggtcataaaagataaagaaagaccaagcaagttataaattaaaggaaactgaagagaaatgagaactaaatgcaatcaatgtatgagtctggattggacattgggttaaaatttttttcaaaatttgaataaagtctttatattagattatgtatcaatgttaatttcctgacttttataattgtgctgtggctgtgttagacaatgttcctttttattaaagaaatacacactgaaatgtgtttttagaagaaaaagatcattatgtctgcaagttaattgcaaatggtttctattcaaactccttttgtgactgtttaaagctctggaaataaagcagtgggttctatttaccaagatctttcccagtttatttttttaaaaagtaatgataaattgattacaaatgtggtatttattttgtattgtattgtaaaaaatattgcacctaagtacatccttcatctcaaagggactttttaaaaaaaggattagaatgatataatgtctttgatttggaattttttcctgcctatgtttttgctgcacatctaatttaagaaagaactaggaggtgcaataaatttccaagatgtttgtttcccaaatgcatgaaatcaaattagcttttgtggcattttttcagttataaagaaagatgtgtttctccccttttcatatgagatatgtgatagctgatatctcatattatagaaagcaaagaccaagatcttctacaagtaatcccttagtattctattcagagaatcctaggctagcagaacaacagtgatagcaactagtggtgcttccatcacttctaatgcacatcatgggatctcaggcaaggagtcttgtagtcagctagagcatatattttgtgagcaaatattaccaaagagattacttatattaccaggtaattaaggctatggtatagattctacaatgtgccttctgaatcctatcttaatctgatcctcctatacagctaatagggtatatcataaaaaagcctatgtttggggtcacaaagagttgagtttgttccatgctcagctgcttaaaaaccctaatctgggccaggcatggtggcttatgcctgtaatcccagcactttgggaggccaaggagagtggatcacctgaggtcaggtgtttgagatcagcctggccaacatggtgaaaccctgtctctactaaaaatacaaaattagcctagtgtggtggcacatgcctgtaatcccagctacttgggaggctgaggcaggagaattgcttgaacccaggaggtggaggttgcagtgagccgagatcacaccactgcactccagcctgagcaacaagagtgaaactccatcacaaaaaacaaaaaaacaaatctggaccaagtttcttctttgagttttagctttcttgtcatcaaatagggataccaatttgccttagatcactgttacaataactacaaataatatttgtaaagcaccaaaagagtgcctgccatataaaagatacataataaaaagtagctatgtttatgacaaaattattctcaaaagatgatgccagaaaatatataccaggtacatttcatctaattaaattttgaaaaattaaaggaaattgagccacaataattgttgtcttaaaaatatttgttcctagtcaggaacctattagactgtttctgcttgtttaaagcattcattcagattatgactccctttagtttcattgttttgtataagtaactctgaaatcacattgctaaactaaagaagcagctgaatgcaaaagatcttaaatcaatgtcagaacttctccttggtaatatttccctggttacacttctgaaaaaatcctgaagtaaaaattagtttttactttatccaacagcaaaattaaaggttaaaattgtaaacctcttgcagctcttttatgactaacataaccattttatagcccatggttacagtccttgcttcaagacagcacactgtagcaataagtttattgcccttccctcaaggacatcattctgggaggttctgtagctatttgacagaggctctctctcttttgctttactcattactatatagaacaaagatgtatagtataaaattagtttgtacatggccaaactatatttttaaggtcccgactcctaagagaagtccaatattggagaaagataaatgatctgggagccaggattctagtcatatttccacccagctgttcgatctaaggcaaccacatcacctctctgagcctcagtcgactcacctacaaaaaaaggctggattattagatgatctttgatcaggtttaagactcttataactcagtgatgatattttcaaaaggaaaaaaggtagaaacagtaggcagtaaaatatctgttattcaaaacttaacagattttgttgaataacaaaatttatgatttttaatgcaaacaactacaataaaggtcagaaattctatttaatatagcataactatattaaagacttcaaaactctagcttttcttgaaaatgtaaacataaaagtaaggatagatatttgcttttaatttcttcatttatgaaactgattacagaaggactctgaggtttagaaaggaatagtggcatgctgattttgaaactccccattacccacctgaaaaataaaattaaataaaatcaaaaaggaggacaaataaaacacacaagacctattccttcagcatttctaggaatcggaaaatacaaatctcaaactacctgtaagcagaagaaagagcaaacaaactaattctaacacagcattcctagcctgtggatacacggagtggaggagaagaggcagaaaagactttgtgagggagagcagggaggagccaaggacccacagggaacacagaaaaaaccaccctcagaaacgagtataagtgagacaataaatgcaaagacactgagcacagatcagcccttggtaattcacagtccagctacctcggggaaactgtgattttggaggagaatcagataagacagaagaggtggtacctcttggagaccaagtattcaaagaaaagttgggactaagattgaaaaattaaggatcctgcagaaatcaatgataagcaagacaagccaaccctgcctaccacaaccactcaaaagatatcataaaggaaactacacagaagggcagaactgacaaaatacagagctctgaaccaaggagccctgataacaaaatgaatcaaaatagaaaaaagtagagcacatccccacaagcctgcaaaacatcagacattgctaataaaaatgggtttctttttgtttgaagtctctccagaaaaccaacattgtgaacagtgagaacacatggacaagggaggggaatatcacacactggggcctgtcagggagtgggggataaggggagggagagcattaggacaaacacctaatgcatgcggggcttaaaacctagatgacaggtgcaggaaatcaccatggcacatgtatacctatgttaacaaacctgaacattcagcaaatgtatcccgtaacttaaattttttttaaattgctgctgtaacacaacaaaagaaaataacaacattctgtcttttaaaataaaaaacaataatgaagcagaagaaaactgaaacatcaatacaatctgagttaaatggcctcaaatacttgtggttgtgaatatgaaaaaaaattgttaaatctgaaatagagactgaaagcagaaatgaaacaaaatttttttaaaaaaaaacaggataagtgaactcaggaaagaaatggggacaaaatgaagaataaattacaaggtgcccaaaagggcacagatgcaaaagaaaacttaaagaaaatcaggaaaagcaataaaagaaaaagagactgagagaaagcagctgaaatggaagacacaaggagatggaatattcatattggtgtctctgaagaagaaaatgataaccgaagtgcaataatatttaaaattatatctcaaggaaattttccataagtaaagaagatatgtatctacatattaaatagaaaatttatgcagaataagcaattctaagatattcttgtaaaactgttagttaagactttaggataatggtaatgaaatgtatgaatttgtatgtgagaaagacatgagttctgggggtcaggggtgaatgctgtggtttgagtgtttgtctccttcaaagttcatgttgaaacttaatctccagtagcagtattgagaggtggggcctttaagagaagattgggttgtatgggctctgcctttgtgaatggattaatccattcatggattagtagtttattgagttctcatgggaataagacgtattgagttatcatgggaatatggctttataagaacaggaagagagacctgagcgagcacgctctgctccctcaccatgtgatgccctgtgctacctcaggactctacaaagaatccccaccagcaagaaggcactcacctaatgcagcccctcgaccttggacttctcagcctccataactgaaagaaataaattccttttctttatacgttactcagtttcaggtattctgttataagcaacagaaaacaggctaagactatctgtccttgtgaaaatttaagaattaaactcttgggtgaaaaaggaactacaaacaaattacagaacttatgaaatatacttattataatgaaaacaataaatagaatgtatggaagatactgaaagcagtgatcagataaaaattcatagcctaaaaacttttatcaataaatatcaaagaattaaaattttctactcaaaagggaaaaaagaaaacaaagtggacaaaaagaaagcacaaggatgaaaataatagggtggaaaagagaaaaacagtaaataaatcaaaattctgggtctttgataaaccactaggtaacaagactaaaaacatgaacaaagaaaaaaagcacaaatacacaaaataagtgagaagggggaaataattattgatatggagaagccagaaattgtttataaaattctaccttgcagacctctatgcaaataatttgaaaacttaaaggaaatgagtaatttcttaggctatggaaatgttccagatcaaaggaggctaaagagacatgacatctaaatgtaatgctcaccctaaactgaatcctgtaccagtggaaggcaaatgttataaaggatattattagatctactgacaaaactgacaagactgaatatggatggtagattagacaaaaagtatatttttgaagtcaattgtactgtggttacagaaaaaaacacagtattatatactctaaaataatgagggagaaaaaaatgtgtgtgtacacacacacacacacacacacacacatacagagagagagagaagatgagaaagaataattaaatgataaagcaaatggagtaaaatattcacaacaggcaaatctattaaaaaaggcaattgttctttgcactattttatttctacaacttttcgttatgtttgaaattattttcaaagaaaacatttcaaagctacattacaaaattagaattatggtaccaatcccatttctattaatatttcatttctaaaggaaaatatattattttaagatgttaaatgatctagaactttaggtgtaaaatgaaaagagctcaccgtgaataggaatgcaagaaagcttttccatattggaaagaatagttcttacaatttctgatgttctgcaatagcccagctcggtcaccaagagtgatttggtaatatctaaaaaggaaatgttttaaataatcactagattttaataactagaattctaaaaaaagacacttttattcagaagaaaatataacatgtttatccctcttcctagttttatcaaattcatttctaagttttaaaatattaaaactgataaacttattatttccaagtcagctttttataagcatcaaaaagagtccagctccttagaccattccccaaatgtacagaatataaccaatttgcctgcaggcatgatacgtgtagtgaaaaatgagcaaatatcttaaacacaaaaaggtagatgttagaaactaaattcaatagcgaacttatatatagatttgaaagaaaacaaaaatgaaaattacatggtagctcttctctcacttccatttacaaagctggcaaattatccaaggctttccattttcctctgaaacatcctgactgcagctcaggacacacttgacaccccacacttcacctcttcccatcagacaagatatatgttcaccaggtgtgtttgtcagcatttttgtaactgttgtactgctttttaaaattaattttaagttccagagtacatgtgcaggatgtgaaggtttgttacataggtaaatgtgtgccatagtggtttgctgcacctatcaacctatcacctaggtattaagcccagcatgcattagctacttttcctgatgctctcctgtcccccaactcacccccgaccgacaggtccctgtgtgtattgttcccctccctgtgtctgtgtgttctcattgttcagctcccatgtacaagtgagaacatgaaatgtttggttttctgttcctgcgttagtttgctgagggtaatggcttccaactgcatccatgtccctgcaaaggacatgatctcattcctttttatggctgcatagtattccatagtatatatgtaccatattttctttatccattctatctttgataggcatttgggttgattccatgtctttactattgtgaatagtgttgcaatgaacatatgtgtgcatgtatctttgtaactgaataatttatattcctttgggtctatacccagtaatgggattgctaggtcaaatagtatttctggttctagatctttgaggaattgccacactgtcttctacaatggttgaactaatttacattcccaccaacaatgtaaaagtgttcctatttctccacaaccttgccagcatctgttatttgacttttcagtaattgccattctgactggtgtgagatggtatctcattgtcgttttgatttacatttgtttaatgattagtgatgttgagattgctttcacgttttttggcctcatgaatgtcttctcttgagaagtgtctgttcatgtcctttgcccactttttcacggggttgtgtttttcttgtaaatttgtttaagctccttgtagatgctgaatattagaactttgtcagatggatagattgcaaaaagtttctcccactctgtaggttgcctgttctctttgatgatagtttcttttgctgtgcagcagctctttagcttaattagattccatttgtcaatttttgcttttgttgcaattgcttttggcgatttcgtcatgaaatctttgcccgtgcctatgtcctgaatagtattgcctagactttcttctaggtttttcatagtttttggtttaacccatctggagttaatttttgtataaggtgtaagggtccagtttcaattttctgcatatggctagccagttctcccagcagcttttattaaatagggaatcctttccccattgcttgtttttgacagatttgttgaagattgatgattgtagatgtgcagtgttatttctgagttctctattctgttccattggtctatgtgtctctttttgtaccagtaccatactgtttcagttattgtgccttgtagtttgaagtctggtagcatgatgcctctagctttgttatttttgcttaggattttcttggctatatgagttcttttttggttccatgtgaattttaaaatagcttcttctaaatctgtgaagaatgttaatggtagtttaatgggaatagcattgaatctataaattactttgatcagtatggccattttaatgatattgattcttcctatccatgagtatggaatgtttttccatttgtttgtgtcctctctgatttccttgagcagtggtttgtagttctccttgaggaggtccttcacttcccttgacggctgtattcctaggcattttattctttttgctgtactacttttaatagttaaataatttaatactttgtaaagtgaagaataattatgcaaaggaaaagagttgtttctatgaaagctaccacatttctttggttcatacatatttctattatcctatgatttactttacctattttatatagattatcctctgatttaccttacctattttatatatattatatttatataattataatttttatataaatataatatatattatattttaacttttctataaaatatatgtattatattttgttataataggtaaggtaaatcacaggataattttgggataattttgttctttattaaaatcaaaaagcctatatgattagggattaatgaagtggggatgacaaataaatgtacatttcagactttcatcaccaatgaaaaaataaagcatttttatacacttaaaactgtcattttaagcagtgttagattttggataaggattcaaaatgtaaaaaaatctctacagtaatacaatgttaatagaaattagtcatgcactgagttcattttggtgagctaccattgtttaaatttcagaaaagtagagccgggcacggtggctcatgcctgtgaacccaacattttgggaggccaaggagggtggatcacaaggtcaggggattgagaccatcctggctaacatggtgaaaccccatctctactaaaaatacaaaaaattagccggcgtgcctgtagtcccagctactcaggaggctgagcaggagaatcgcttgaacttgggaggcagaagttgccatgagcccagatcattccactgcactccagcctgggtgacagagtgagactccgtctccaaaaaaaaaaaaacaaaaaaaccagaaaagtgatttcttagttcaaattagtgaaacctttaaaaggattgtctttaaagatcattatttgagaacagtgctttttcagacatattctgatattcacattcactttataacagaattacagattaaccttttaattatatctttcttaaaaagctgtcagaattccatttcttcaggagatattttcaccagtgtgtagtttgattccacagattaagcttttgctttcttcattattattaagaacttcttacatattagagagattgccattcattgcttttttgtcttttcgaagagacacaggcagacttgctagactaaagctgacactcttaaaagcatgcaacaagaatatccccacgattattgtaaagccagtcaaaagtaccagtgacatcatcaatgggcatatcttgccactccttaaaaataatagctgaacaagtttaaaaactgatgtcgtaaagaatatgtaatgtattggagtcatgatggaagtgttaaatatatccagggcgcaatttaggtaattaatctatgtgttcacacagacaatgaggcttagcagcagaacacaggccaggggatgtggcagtgcaggctttccagcaaacagctctctgatagcactgcctaggctcttaacccaggagactgaaaatgtgccaatttgttacatacacaaatgtgcaaattgctacatacacaagatcgttgtccctggtggggacccaccaggaagattaatatcatggccataatgaccacaagtgttgcaaagtccacaaaacctggatcacctagcttgtgagatattttatttagtctcaatatcctcttcttttggaggatgagtgatcgtaactgtagatcctcaaatacttagcaaacatccaaatttcccgtaaggattaaatctttcatttagaaagtatgaagaaagaatagcacttactaggacgctgagagttcctagtggagtcaccagtgtggccggtgcaaacccatatgcagctgagttggccacctcgccagctgccattgacagcagtctagcccaccacaaccattctttaggatatgcgtggccaccttgacctgctctcagaggaccttttctggcaagtcgcagaaagcctttttttttcccctccccaaatgaaactacctccagtgaaaatgctggagctcatagctaatcccagaccaatataaaagtcatattttccacaccctcggctcatttaacaaaatgttcctgtgaatcacattgatcacagaacagagaaactgccagtactggaggcagaatgatgcaattttcaaatagtttgaaaataggacatcagtgtgaatgtccttcaaggaatgagttgctttgttatctcagacctggtctccctccgctctcagtctctgtaactgaagggcaatcacagctaggagagtgcgtaagttttatttggtctcttatgaaaaaaaaaaaaaaaaaggctggaggaggttagatatgatttactctctctcattttctcgtaaatactaccctttattctcatttcaagtttttaaaccctagcagagtagctccagcctgaaaggaaggagtggcgacctcaccccagtctgcaggccagcctcccagcttcacttctgcgatctggccctgggtaccgtggctcacacccgcacacccgcacagagaccgccccgtcttacgcaggccatcccggtaggaggtgcgagcattcctggcggcatccttgtgcagctttctcccttcagaagcgccaagaagccccgcttccttcagttctaagatgcacgttttttcacgttaacatctcgaaaactaggacgcctcaaccaatctttggggccttagaattcaataaaaagaaaatgacctaaaaatctgctctcaaattaagtgattgaggagaaaaattaaataaaagtctaggaagattctgaactcaaattgctttgcaagcatctttaaattcttgctgcatttaaaagaatctcaaagtgcaaactggaaaatgttggatgtagtttgtggaagaaacgtagctcaaaacttcaatcggctgtgagaaagaaggaaaaaaaaagactttttttctgtggaatgtcagcccctttaaattatcaggcccagagaggcatttaaagtatactagcagtcagtctcactcccccttgagctaaataattgtttcttgaagccacttgctatgcaggctctagactaactgatgccaagtagccataaaatgccatatgctctatagttcaacaatgtatagccaatcactaattaatgtgatactggtaaaccaaagaaaattcctgaaaagcattagaaatgacctcttcttctgatttatccttttttctttaaaaacttgagcctctccttagttctctggagcactctctaagacaacctagaagtgcgtcctgggctgcagacctcaaccttggcccaaataaactctctatattaattttgcctgagctttcttcttttaggtcgacagctgtcacagaggaagaagactttaaatgccaatcatccagttcatgtaaaatgtatgtgtatcattataagtgattccatctttaattgacttttttccccaaattactttccagtaatttgtcacaatggcatcagatcagaggaattctataaggaattttagctacaatggctaatacataaaccatgaactcaaacgagggtaggaagccagtcttaatcatcttcctatctccatcgccaaatccaatgctgagcctgaagtgtttgctcaattacatttgctttccctatttccactccacattcaaaactgaagttgaaataacagaacaaagagaaaataaacagtttatgaatcacttaacaactggggaattccataggtaaatattaaaagaacaataaaatatgagtacacaatatcaattgcactaaaaattggagaataaacctaccttcttgtgaaacctgtagtttttgaccattataaaaggcaccttttcctttcctgacagtgtacctcttgtcttccacacaactgtacacaactccaaattctatctgcagaagaaaaacaagtttcctttaccaaacctgagtatttttcaacattaaatcaatgaattgttctaagatcatgacaagaaaatatcatatactactaataatagattgaaatggctatactgtaggatgctttccagcctaatcagagaaagagttcaacagatctggaatcctccactctcacctcatctatgtccagagttaatagtattcaccttacctctctccctcctgctccagaagaagacagagtttttccattttctaaggtgaacacacctcctgtgttaggatttctaccctctcttatattctctgaaaaactgctccatcaactgctacctcttctcttggatttttcttctcataccttctcaccaagtttctccctcccttacaaaaccttcaaaatgttattccctccttttccctttactgccaatgagtagtctacaattgcatctcctgtgctcctcttaatacattacaatttggcttctgccctgatcacttattcttctgaaagcccctcagagaatatcagtgaactttcctgaccaaatgtattgtctgaagaattggagactgctggccatcatcaacccttatttaatacttaattctgtacctccatgtttccagaattactctttcagttctacctcactcaccaatccatttcagagtcactattttagaaactccttctctgcctcagccttaaaagttaggtacttcaggcttttcttccttcttccattacttccatttcccttgtagctctccatattcatacgggttggcctttccagtccacaaattcaacttatgaataatttggctcccatcaaccccgtaatcatagataaaaacatatactttggaacctagtcttgcagaatctctatcaaggaggtcaaaatcactcattgcctaattacctcccattgcttccccataaatctcatcattcaaatttaatcttaaaaacacttcccaattctggcatttccttggctattctcactgcctctacttagttcagaattacccaaaccccagtataatctgtacattgttagaattatctgtcactttccactccaaaacctcttctgtttcccaactacctagaaacaaaaactaaattttctcacatagattggccactgtgccttacagtaaggccaaactaacctctgccccggccacttccagtgcttccctctccatgaccatctcactgttccatgcacacatcatggtcttcgacttctccaagctcttctttggattaaaacgcttttcttttttcttttccttttttccccccatctggcaaagccctagttttctaaggatcaactcacatgaccaacttctaagacccccttctgttataaagattttcccaacccacttttggcagattggtgacatcctgtgttcccacagtatttttttgtaatagttccaccacatatcatctttacctgttcacacatccaactctgtgctgagctgtgagttcaatggcaggaccagcacacagcacagggctgattatagactgaatgctcacttagctccttttggacgttctcatgattaatacaaccctagggctaagcctccatttgtattaatttgtgttttattttcagaaatttctttagtgtttttgtgtacaggttgatcgaacatatcaaaaattccccgaagacagggatgtaagatagtagcaaacatcttcactgtttaaccaaacaaacagccaaacagcaaggaaatgcaatagctatggattttactctgctgggctttctacacaagtattcaataatgtgtcgatcccacaatacacttgctattttcaaaccatgcattggcccttgctaattcttggtctttaaagggctcttttcgctgatacctattgaagcattcccagcttaaatcccacgttttccatgaagcattttagatcacacataaactcctatcccatttcactctctgacacatacaatggtggctaaatactgaactttcagttacttgtgtgcattttctccttacaacccctgcttctcagaaagcattacattttcttcactggaaatgtgtcatgaacattttaacagtcctgtagcttatattcaaaataatgcagttatatgaattgaaaataaagacatctaaatttattatgaagatacatttactctttcccagaaaacgaaagcaaggcatttaatcaactatacatttaaaacaacataccttcttatttacaacaaggccaatcgaaacagctacaaaaggaaatcttaaaaaaagacaaaacacaagtttaccaagatagaacttattgttaatatagttactaaaattcatctttttgtaatataagttctcataaaatttttcctataaacagtcttatccctcctccccgcaatatctaagatgcagaacagtgtgtattgtatacaactccttgtgtaaatagggaaggggacatattatacacacatacatgcattcacacaagatgctcctacaggcatgaaacctctcggaaaggattcataagaaatggataacaatggtcacctgagagatgggtcctgagaaactggggacagaagtggcaagggtaccttctactgtatgccatttcctatcttttgaatatcaaatgccataatctaatgactgtgaaaatatcttttcaaaaaataaaagtaaattttaagaaaattaaagtgaattcttaaaaagaagagtctattttcatcatttttcctgcagcctggagccttggtagacacaggtactgcgttgttcaggattgctgttacttgtctctattccaacaccaaacatgtaacttcacatctgaatagtagacagttcaccattatttttatggttgcatgacagtttaaacacataggttgaaatttctgacccacaagagagtcaagatcaaggcaaaatagggtcaacataactactacaaataaaaacctctaaatatgagtttttattttaacaaaaataggatcaaactatacacactgtatcatataatcttctccttttacattagatcataagcatctttccacatttaaaagatacaacactatcatgtatataaagtctacaaaactttatagattttaactattctgtacatagtacagatgtgtacaactacatggcaacttcaaaagtaacactgatgggccgggtgtggtggcccaagcctgtaatcctagcattttcggaggccaaggtgggaggaccgcttgaggccaggcatttgagaccagcctgggcaacatagtgagaccctatctctacaaaaataaataaactagcttggtgtggtggcttgcacccatagtcccagctgcttgggaggctgaggtgggagcatactttgagcccaggagttcaaggctgcagtgagccatgatcttgccactgtactccagcctgggtgacagagtgtgaccttgtcttaaaaaaaaaataagtaacatctatgtggaatcccaccacagttggctactcattttaactcacatgcacaattccatcaggctttcttctagtgatatcatatacttaaactctgtgccaggcactatactaagttcttacataaatgtaccactcatagagtcccatcaataaacaattctattagacaggtgacattaatatggtcttttttaaaactgaggcttaaaaagattaacttgcccaaagtcacaaagtcaatttaaaaacaccagaattcaagcctaagcctgttgaacctaacactcctccaatttttaaccctgttttctcttctggactgaactcattctgtattgacagcattccaatagtgacctcattagtttctttctcgatctcaaagaagcaaggttgtttgcttccatttttatgtggctccaagagtaagaaaagaatggtgaacagggcatgctactccacataaaaagatcacaccattaatatttctttacctccatatccgatgagaagtctgcatagtacaatttgctctgttcactttagatacactttcttagaataaagatgcataaacaaagtgcacaattctctaaaatgtgtatgttcccgcacagagcactctaaagggctatccaggtaatatacgaagagcaattgtactaaaatgtttaaaacatacctatggacaaacttagttgttccatcaatagggtcaatgatccacgtagggttgtcagttaagacacctttttccccagctgccagattcctcaccagtgaaactaaaagcaagaaggacacactcctattaacaatttccaaaccatgacatttccttagctacacagtcttgtataaaatataaaagtctgcaccctacttttctattgttgcttctttgtccctagaaagactgataacagtgagagggaagatttattttatttcactgaaagtaaagtcatgtgaaaaattacagaattcaaaattttaaaatgtggctgggcatggtggctcatgcctgtaatcccagcacttcaggaggccaaagcgggtggatcccctgaggtcgggagttcaagaccagcctgaccaatatggtgaaacccctctctactaaaaatacaaaaattagctgggcgtcgtagcgtgcacctgtagtcccagctactcaggaggctgagacaggagaattgcttgaacccgtgaggtggaggttgcagtgagctgagatcgcaccactgcactctagcctgagtgacagagcaagactctgtctcaaaaaaaaaaaaattataaaatgtaataccagaataagtaatggcatatgcatggcatgcgcgcacacacacacacacacaccagacaagagcagtttttggagatgagaaatcattaaggaaatgccatgattttaaaaatgggtccagacactctctaatactcccatcaagaggcagagcctaataccccttgccttgagtgtaagctacacttggtaacttgtttctaactaaatcttatggaaatcccataaatggtgctagacttcactggttttcttctttcctgttttcttttctatttattttctttcatttaaaaccgaactgtcttaataaccactatcatcatctttatttatctctttttctcttagctataaatatttttattcggaagaaatacacttagccacggctttaaacattttttcttctcaatggctaaaaacaccaggaatggccaatgacatgactaggaagaagtccagaatcacagtgctaacagtttagaatgataatgtttctgttaaatttctgtgcctgtaaaagagctctaatttcaggattttctctcagactttctagagctactgccactctaccatataaagaagtttacgatacacagaatgaaattgaacttttaaatcatgccaacggcagacgtttgtcacgttagcttcccagcacccaaccattccttttactatgaaggaatccaaatattcctctttcctactccctgtcagcttgagcatatgcaaagcacctaaactcagaaactgcatatccctgtccagaatttgtaatcttaaactaatgaggtaaagataaaaggttagttagaaagtattcaaaccatcagagtcaggagtgaggctaccagtggcctcctcagccatagctcctgtgttccctcagatactcctcctccctcccatggttctggcccaaggagcccacacccacaacataaatcccttttcagcttaagctaactaaagtcaatttctgtgtctaaaatcaaaatgcttgcctggtataagtaactccaacttagatttcattttatcatttgaaatggaaataaaaaaatacctatgagatggatacttttcctttatggaagagataagcattttttcaactttttggtcagtagcagttaccaaatcaactggagaacctttcaggataacattcacttcatttttaagagcatcatgaaccacctaaaaagggtttttggtaggcaaatagaaaaacataagtaattttcaatcaaacaaaaagataaaacacaaaaatggtttacaacattcaatctgactttaaataacattccttaaagatattcttggctgggcacggtggctcacacctgtaatcccagcactttgggaggccgaggcaggcggatcacctgaggtcgggagtttaaggccagcatgaccaacatggagaaaccccatctctactaaaaatacaaaactagccaggcatggtggcgcatgcctgtaatcccagctactcaggaggctgaggcaggagaatcgcttgaacccggcaggcagaggttgtggtgagccgaggtcatgccattgcactccagcctgggcaacaagagcgaaactccgtctaaaaaaaaaaagatattcttaagaatttcttataaaaatgtttataacataagccttcaataattatgaccttttaggtacagaattatatattctaacatcctattttagcttcacaactgtgatcacaagacgtttaatgatataaaattgaagtgctcactataaagtgtttagtaaaaggaaaacaaatgcagactgaacaaaatacatattttatttaataaggcaaccacacacttcacacccatcacattatggctgacaaaattttaattcatacctctccagcttgtcttgctagggttactgcataatccatgcattcctgccaaggatcagccatcttctgaaaatatttaacacatgtcagcacaaagtggttagaattctctaaaagtcttaattatagaatagttttttccacaaaaaaatcttaattagcaacagactttcattttgaatttaccccctgccctattccagagttcaatttttttttccaagatttactcctagaccaattaaagaacattttctacctggattacttcactactaatacagaaatatacaaaaaaaaaattctattaaattatctccaaatgtgtccataccaaaacacattaaaaaacaaaacacactctctggtgcacgcctccaagatgacaaagaaaagagggaacaacggttgtaccaaaaaagggctgcagccacgtgcagcctattctcagcacaaactgtaaccaatgcatgcccaaggacaaggccattaagaaatttgacattcggaacatagtggaggccacagcagtcagggacatttctgaagcaagcatcttcgaagcctagttgcttcccgaactgtatgtgaagctacattactgtgtgagttgtgcaattcacagcaaagtagtcaggaaccgatcctgtgaagcccgcaaggattgaacacccctaccctgatttagacctgcaggtgctgccccacgacccccaccaaagcccatgtaaggagctgagtcaaagactgaagacggactattctatggagaaaaataaaataaaaattgtgcttaatattgcatgttgagtgtatctgtgccagatagggtggggattttgtgggcgttagagcaagtgagaagttacacatagtattttcatcagaaagaaagcttattcatgtaaattaaaccttaattgtttgtggtcatatccctggcctcgcaatttgcatagctgggtgaaataaagggagtttaggaaaaaaaaaatcaataactggtttaggaaatagagaaaaaggacccaagaaaacattttaatagataggtaaacgtttgggtgagggataaagtgaagataaaagaaagaacactgggaatactgaaataaaagaagttttgaaaggaaggagcaaaaggcacatgtactaactaaatgccaggcaggcaggtgctctacacaggagatggattttttaataagattataaagatcaagaacttaaggcttagagatgagaacttctgtacccaagatgatagaaagaaataacacagtaagaatttgaactgattttaaattccattgttctttctattatggcaatctgagaaaagaaaattccaggaccaaaagaataataaaaaaagaaaaaaaatgagatgtattactctgagattagagaggagaaaaaacaacaacatttatttgtgttctgaagtgtccagctttccactgacttctgaagactagaataactcatcagtggcttgatcacactctaaagactgtacctagcacaatgaagctttttaagctgtcagattccaaaaatgtggcctcagtataaagcaaccctagttttgtcttctttacaatggagaatagctaacatagagttgcatcttgaagatactcagaaatccctatgttggggcttacattataggaaaagagacagaagaggaaaggagggcaaaggactaatacagtgagtttctgcctgttgctttttcttcctgataaaggcattaaaaaaatttttttaaggaggccagtctctgagtcatataagtaactccttagagatcttcaagaattgttaccaagcttttttttcattctgacactcattctgctccactagtcttaacagaactagacattttcaagctgcacctgctttcctgccagaaatggctcaagccactcacagcactaatgtcacttcgaccaattcttcagggcctatttcaaaagctaccctctcttctagggattcttcacccagaagtcactatgtgtttcacctttaaatagatgtttgctgaatacttattataccctatacactgcaccatggggaggaaaaccaggtcccattcacacttactctctaggaggggactcagatattaatcaaaaatgcacagaccacatgcaaaatcataactgtaataataaaggctaagtaggagaagtgcagtgagaagcatctaacaggggagctttcacctggactttggcatcagatcaggtttccctgaagacaagattaagccaagatgagaagaacaagtgaacaggcatgaactcactcaactgcaggatgcctggtacatgaagactaactgaagggcctaagtgtgacagctcagacgtcaagggaattaggagggataaagctggggaggaagtggggtcccttacagggtaggtcccttacaggtccttgtaggaccttactggaccttacaggtaatgaggtcccttacaggacttcagggataagactttgatgggagacacttgaggaatcactgcattgtggctactgaacagactggcagaaagtgggtgtgggtagacggttagatgatttacattcaggatgcagtagagcggaggagacctgatgattggctgaaacctggggagggaagttttctggtggagaagctaagggagtcaagagataatctgttttgggaaataaaattggggagactcagtaacagattggctatggagtatgagggagaggaagagttcaaggatgaccagattttccagtctggcaaccgaatccataacggtcacatctactgaatggggagtaacaaaaaaaagagtcaagtttgggatgtgggtaagaggttggaaaattaagagttcaattagcagagatatgaggcctccctgaaatcaaaagaagctgtcaattattcagctgaatagatagatcctgagctcagaagagaggtttggcctgcagatataaacatgtaagttacttgagtagatagcaactgagggcctgagtctggacttcatcggataggcatgattgatagataattgtgtaggaatatcatcccacaaaatctgtatgatctaatagtaatagaccagggaaacccagtgaggtctgtctgttcagattcttcttggttcccctttgcagcattccttcctcctgggtatggagcggggcctcttccgaaatgggagtcttatgaactacaatcagacaaagataggccagagaatttatttataaccagctacaagacacaaaggtaggggaagatccttaccttggggagaaaaagcagcagatgaaaggaggacagaaggtcaaagagagaaattccatttttctgggggctgcagtgccccgacattataacaaaagactgtaacaagggcttatgggagttatgagccagtaatggtggatgaaaacatatatatgtaatacatttattctgatatacacatatgtatcatatcacaagtacatttcttaatggaaaggggccgtatttactcactttcattttcccaaatccataaacacctgaactgtttcctgctgtttctgtcctggtcacacccttcccagcgtgggagccaggccatcttcctctcggctacctgtccccagcagtgcgactggcgctgcgccatctcttacggtgactacctgtaagtgatctctctgccatctgtcggccacctgtccctagcagcgcgactggcgctgccagtcatccgggcgctgccccatcacttacggtgactaactgagcctgggatgcgccaagtttctctaagcttttcggagtagggaaaatgaaaagcggcaatgattccacagaagctgccacaggggttaagtgcagtggcgtccgcgaaccgctactccaacatcgggagtgttcctggtcaccccagggcagctccagataacgtggcaggcaagagtcacccagatgcggccttcgccccaggggctgaccgcacaccgcagaccgccctcgcccccaccccagcagagagaagcgccgaacccggagagggtggcgaggggggcggggaaaacaggagcctcacctcgagtcggcgagcggggcggggaaaacaggggcctcacctcgagttgtcctgctagctgggtgcctggtgctatccagcctcagtgctttgggaggcagaggggctgcccgggaccaaaaggtcgccgcttcttaagcccatcaatgagggggcgtggttgctttgctgggccccgccccgagctgcgccctgagaggctctgctaggcccggcccgggtcttcaccggcgcaggagcctcagatctggcctcttctttcccagttctggttcttctaacttcttttctcctgcttgccccttcttctctaaatctttttaaaattcaattcctctttatttttctcttttcttctttattcttccattcactcgccttttcccatttctctttctttaccctttctctcatttttccgtagtaccattttgacaaaacacaaattggagatatgacttcggttgagcagcttttatttgccaaagcattacctggtaaacttatattaattttttttaatagtcagtagccagaactaactgccctttttctcagtgatatatttagataccacctatcgaggacttactatgctttcagcaattgtgtttttatatgcattatttttgttaaacgttgcctgaggtacgtataattagcttcatcacacagatgaagaaactgaggctcagagaaggtaaatgatttgtcctcacacaggtcacaggtcacacagcaagagcagagcagtgaaacacactgactccaaagtgttggggctcagaaaacgacaccccaaaatgaagtcctcagaagcagcctcacagaaaaaaagttatttgaagcctcttgccttcctgtctctggccccacattctccctcaaggcttgccttagaaactggaattcttcttccccaaggcaggtcctagaaacccaaaaatattattctaatctccccaatttttcgcgtaaaaacagaccataaagaaattatccaacccactttttctgactgtaggtctcaagacccccattccacagagggtcttgcccaatgcacagaaggaaggaatgcaccacagagaggccaaataaaatctaaacagacaggctttgctgggtttccccactcagtctatttgcattacactatacacttttggtccaatcctatttctacacagctggttatactttgtttgaacctaaacataaaaatggactgttcccctgtatcttgggtcttcattctgaaggctcccatgtcacttaaaactatgatcaaataaatttgtacccttctctcctattaatctgtcttttgtcagttgattttcagcaagcattcagagaacaaagggaaattttccttttggtcctacaaaagtcctcacgcagagaatgtacggcacaaggaggttgcattatacgaggtacaaggactagtttatggtccttaaaatgtttcctcttcttgaaggggcagcatcgtggtacatacatcatcatcatgcaaaaactgttgcacagatataagatgtcccagccacagcaggaacagaaaagtgagctatttggctccttgcttaggaagtgattgtttctcttcatttaatctaaggacaagatgttgtcacaatcatgttgccaatgaaacacttcccagagattaatgatatgaactgtggacccaattcccacaccccacaaagagcaagaaacttgtctttaattgtctaaagaatgatgcctaggtatctggtttggatatctctatttgcctattaaatgattttttgttttgttttaaagacaagctttcagaaactagctatttcattcttcattgtcaatcatcttaaaaatcttgccaactgcatgatgacaagtgttaattcataactaaataaaaatttccaggcttttgcagaaatgtcatccatcatcttttaacctttttaaatgaatgtggtcccagtgatttggcaaagctgctaaaatcagtataatcaatttgaagcaagagagattcaatatcacctatcttattccttcaaatgataacatttcaaattacctgtgtcaggtgagcaagaagcctagtatttttctagagaccttagcatctgcctcacaattgttgtcaggtaacctagattttttcagtccaaagaggccgttctgcttccaaatgcctactgaaagtgaaatgcaaaatctgtcggtacacagggaagtcttagtgttcagatttgattgtggtaaagctgcaaactggtctcacaaatccaaaggatctttggtccaatattgtgaaagtagttcagaaagttgcagagacctcagtacaggatgcactacctctgagttcccaaaggggcagtatctaaaactctggtcccatctgcagccactgttcctaatcctaagaacgtctgccgtgcccaggtgttgtcgggggcaggggacagcagcacaaactctgcttcctggcatgatgtccagctcctcactctttcaaccttccctaagggaagctccctcttggaggcctttggtatcctttcctgtcagctgactcccatctgtgagagaggttgtaattacgctgaacctcagaatgaaagagaggtgagatccaatgcccctgacacctccccagacagctgagcatacagaagagagttctagggaagggtggccctgtgaagccacaagaaggtctgttatcctttcccaaaggcaaggatgacagtgcttacttgccctgtatttgcataataaagagaggccgccacaggaatgagtgggcaatttccctccccagaaatcataggcatcttgtcaactgcacttagtctttggagttgacttcttttaaatgacctctctcttcattaaaaaaaaagttttagcttctacatgccatgatattctcagttaatagttaatgatttaagtggactctgacctaatataattatatatacaccatggcagctggtcaggggtggagtgtccaggatagctaataagatcttacgttttgctaccataataaagtatcatattcaccttgtactccataaaacattctcaaaccaacacaactgaaaagttaccgccttcctctgaactcctgtgtagcattctactgttggaagcactctttggatgcttaacatttatggtgttgggtatatatacacatgtattcttcctcaccccatgtcaacttttttatcagctcataagtggcttatgaatggacatcattttagttactctttgactctccacagtgcctgagtaggaattcggcaatgctttaattgttaagctaggcaatttctttttctcttatcttctaagataagggtacagcttttcttagccttgtaagaccaaaaggaacagtaacatttcacatccagaacacatggctcctgtaaaaggagccacagaggctaagtttgccttggacttggaaaagacagctgaataatggccaggactaagaaactatttaacaaccaactttcaatagcaacagttttataaacaagaagacacagcatacaaactttagcaaaaaagtgcccaaatgagaaatgtgaagcaggaactaagagacccaacaaaagcacctctaggttatctgtttttagaaacattaatcccactctgaaagtcaaataaatccctatgaacattaaaataaaactcagaggtctaattattctctctaagaagtttgctctttcaggtattctacgcttgatgactatttcaacagatactgataaagtatgaaaaggagtgttgacacaattttagaaataggaatatgaaatgtacctgacaaccctaatatcttactgtatgtgtaaaattgacaggcatcgtgatcggggcaataatgttaatgtgcaagtcatcaaaatggccaatgtgaaatttccgtctagaagcagagaaaagagacagcccccacccttcctgggcacgtgcaggtcattacaaatccaaaagcttgtgcctcaggcaatgccacaatctgagacaaaagaaatccacaaaatggcatcaaaaaaaaactgtgtaactgccccaagaattactggcaaaggtctcttcaatgctgtttgaaacacctgtaattcaatattgcaactaaatgtgcatttattcaacagtattagtagtaaaataagcattaggatatttctgtcaatatgcattggtgcctggagaagactgtctttttgtctgagtactttgactttcacattcttgatttctttaatgagtctttcttgcctaccttcagaatcccagaattgaatagtcacatttgtttctccttcttcatcagtcaccagatttatggtacagtttataacatatgatgatatcttcttggtcaaataaagggttcagttcatctataaaagagagacactacaaaactggatttaaaaaacaaagtccagctatatgctgcttataacagacatcctaaaacaaacaacacaggaaagttgaatataaagggacaaaaacaagacataatagttaaatattcaccaaaaaaaagctagtgaaatgatattattataattcaaaataggatttaaggcaacattcataaagagcatataaatgcagaaattctatgcacctaataatatactactcagcaaaaccattagaattataagaataaaatgaataaaaccacaatagtgggagattttaacacatctgtctcaaaaactgatagatcaagttgaccaaaaactagttaagtacacacacacacaagcacacacacatcaatatgtgcatacatatggacagagggggactgcaaatgataaaacaaacaggacaaaggtaaataattggtgcatttgggtaaagtctatggaaaagttatatgtactatgtttggaacttgcctgtgttttaaatggtatcaaaataaagatcataaaaaatcacatccaaataagtaaattaaaaacagtaagtttcccatcctatttgaggaattggaaaaagaacatcagataaaatctttttaaacagcagacagaaggagataatacaagggcagaaattgaccaggcacagtagctcacgcctgtaatcccaacactttgggaggccaaggctggtggatcacctgaggtcaggagttcaagaccagcccagccaacatggtgaaaccctgtctcgagaaaaatacaaaaattagccgggcatgatggcaagtgcctgtaatcccagctacttgggaggctgaggtgggagaatcacttgaactcgggaggtggaggttgcagtgagccgagattgcgccactgcagtctagcctggatgacagagcgagactccatctcaaaaaaaaaaaaaaaaaaaaagtagaaattagtgaaacagaaagcaatgaaacaataggggaataaaactgatatatgtttctttgaaaagactgacaaaaaataaagatgaacctctaactgtactgtttaaaggggaaagaaagaaaactacaaatgacaattattaaaaatgaaatggaatggctaaagacacaatagagatttgggaatataagagaataacttgaacaactttataacatctttataacggataaacacatgtatttatatttaagtagcaattttgaatcaattaatacttgcagattttctttccaaaaagatagctaatgcctttctttccttttaattcctagtctttacttatgatttgacctgagtaatataacaatagtgataaaatcccaaatcagaggcaccaaaaaatcccacttcaatgtcacctttgccaaactggcatttagggggggccttaaaacttgttttttctgatgcaagattcatataaaatctttgtatatatttctctaaatataatttttaatacataatattttcacacaattaaaaatgcaggtaagtatacagtaaaaatcttctccaatgtttgcctcctgctgaggcagaagaattgcttgaacctgggaggcagaggttgcagttatctaagattgcaccactgcactccaacctgggcaacaagagagaaactccatctcaaaaaaaaaaaaaaaaaaagatgttatttgcaagcctcatggtaattaaattaaaaaataaaaaaactacaaagttacacaaaaaataaaaagcaagaaattaaaacatgccaccaaagaaaatcactttcataaaaaggaagacaggaaagaaggaaataatgaagagaagaccacaaaacaaccagaaaataaataagaaaatgacagtattaaatccttacctattaataataacatgggatataaatggactaaattctccaaccaaaacacagagactggctaaatggatgtttcagtatacactatcattccgtgtgataaatcatatcaacacaatgaaggacaaaatcatatgatcattttaattgatgcttaaaggcatttgataaaactcaactataggcacctacatcaaaaaaagtgaaaaaacttccaataaacaacctaacaatgcatcttaaagaagtagaaaagctagttcatgataaaaaaccctcaaaaactgggtacacaaggaacacacctcaacacaagaaaagtcatatataacagacccacagctagtatcagtctgaatgaggagatctgaaacaagaatgcccactttcaccactattattcaatatagtactggaagtcctagctaggagcaatcagacaagagaaataaataaagtgtatccaaattggaaagaaagatgtcaaattatccttatttgcagatgatatgaacttatatttggaaaaacctaaagactccaccaaaaaactattcaaactgataagcaaattcagtaaagtttgaggatagaaaatcaatatacaataatcagtagcattcctataagacaacatcaaacaatatgaaaaagaaatcaagaaagtgattccatttataatagctacaaataaaataaaatacataggaataaatataaccaaagataaggacaatctctctgtgaaaactataaaacatcgatgaaagaaattgaagaggacacaaaaaatggaaaaatattccatgttcatgaattggaagaaacaatattattaaaatgttgatgctacacagaacaatctacaaattcagtgcagtccctatcaaaatatcaataacattcttcacagaaacagaaaaaaaaaactctaaaattaatatggaaccacaaaagatccagaatagccaaagcaatcctgagcaaaaataacaaaactagggaatcactttacctgaaaattaactacagagctatagtaaccaaaatagcatggttctggcataaaaacacacagatagaccaatggaacagaaaggagcccagaaataaatccatatatctacatagaactcattttcgacaaaagtgccaaaaatatatattagggaaagaacagtctctttaataaatggtgcccgaaaactatattcatattcagaagaatgaaactagatccttatctctttccacatacaaaaatcaaatcaggccgggcacggtgtcttatgcctgtaattccaacacttcaggatgccgaagctgacagatcacatgaggccaggagtttgaaactagcctggccaacatggcgaaactccatctcaactaaaaacacaaaaattagccgcatgtggtggtgtgccactgcaatcccagggaatggggtggcttaggcaggagaatcacttgaacccaggaggcagaggctgcagtgagccaagatcacaccactgccctccagcttgggcaacagagcaagaccctgcctaaaaaaagaaaaacaaaatcaaatcaaaatggattaaagatgtaaatctgagacctcaagctataaaatggctgacagaaaacattgggaagactctctaggaaattggtttgggcaatgatttcttgagtaataccctataagcacaggcaactaaagcaaaaatggacaaatgggatcatatcaagttagaaagcttctgcccagcaaaagaagcaatcaacaaagtgaagagacagcccacagaatgggagaaaatatttgcaaactattcatctgacaagggattcataaccagaatatataagaagttcaaacaactcaagaggaaaaagaatctagtaatcctattttttaaatcggcaaaagatctgaaaagacattttcaaaagaagacatacaaatggcaaccaggtatataaaagtgctcaatatcattgattatcagacaaatgcaaatgaaaactacaatgggataccatctcaccccagttatatacttttatccaaaagacaggcaataataaatgctggcaaggatgtgcagaaaaggcaacccttgtacagtgttggtgggaatgtaaattattaatacagccactatagagaatggtatggagcttccccaaaacactaaaatagggctaccaaatgatccagcaatctgactgttaggcatatacccaaaagagaggaaatcagcatattgaagcagtatcttcactcttagatttattgtggtataatagccaagatttagaagcaaattacgtgtccatcaccagacaaatggataaagaaaatgcagtacatatacacaatggagtatgattcagccataaaaaagaataagatcctgtcatttgcaagaactagaggacatggatggaactagaggacattatgttaaatgaaataagccaggcacagaaagacaaacttcacatgttcttactcatttgtgggcactaataattaaaataattgaactcatggaaatagagagcagaatgatggctgggaagggtagaggggaggcaaggtgagtggggatggttaatggtacaaaaatatagttcaatagaataaataagatctaatatttgatatcacaatagggttacttcagtcaacaataacttatagtacattttcaaataactaaaagtgtatgactggaatgttcttaacacaaagaaattataagtgaggtaataaatgtcccactcaccctgatgtgattattacgcattgtatgcctacatcaaaacatttcatgtaccctatacacgtatatatgtactatatacctataaaaattaaaaatagaaaaaaattaaacattttaaaatgagaaatatgataaatccagaaaaaatacattttattgtaataatatatgatttattttcacactattacactagcagcagatgtcactttttcagatggcctttgtttctctgccatactctcttgtttgtgcaaagaccaacctagcacccaacagtgtcaaagctaaataaatgtttgttgaatgaaaaaaaaaaagaatacaccaggtagttcctcaaatttatttgaccatggaggtaatgttttacgagcttctgtctagagagcctaattctcaacagaacatatttagggaaatattggcttatagtattaaaaacataattcaacaagtaattattgagcatgaattatattctagccctatggcaatcattccatgcttatagaaaagtagactaaagtcctcatttcaagtagtttgcaggctcttggtaaataaacaacaggaaatatatagcaagtcacagcggtttacacagaatataaatgagcatttgcctgagacaaaacaattatttaatattcaatatagagtctgacatatttattcaatgcaagtgtccattctggtgaccagtcacaatttcatttttaaggatgtaaaatatttaatagaggagaagaatcctttctttcagtctaaagtgttccccagtgaaatttgaattttactgtttcctcctcccacagaattgaataaaacaactgcctgactaaagaggaggtatcttatggtttaactgattaaagctccactaccaaaatagggggaaaaaacaatctctagaaacaagtttcaaattaaaataggtgttttggacttttttattcctcagtttttttcagccatatcataaatgtttagattgacaaatatgatccaagtaaaatcatcacataatgatccccttaaaacaaatgtcattttgtacagttaattttttattattctttggcacctgctaagcttctttcaaatgaaaaactatactcttgctggcacgttactggtgtaatgtcccgaaatatgttaatattattcatgattttgttcttaagtacattttaactgaattatcttgagttaggatataaacaaaatgactatgacaaataaatgtttgaaaaaagaaattgatgtaatttctttaatgtttattcttctattacaaagtttgaggaaatataagaatcacattttcatcatttcttttcgatactatttattttttatctgagaccatttagtttaaccatctgcctaaatcaaaatgtacaggataggtcattaggtctactcgttgttccattaatcatcattttaaaacagcttctgccgtgcttgggaaaggctgacttgtgttaagtaatatacgccctctagtggatgaagatggagaagaaagtatttgagtttttcacttagggctagttatgagttcaatttctgagcactaattctgttttctagcttggatttccccaaaaatgtaacactatgagtcaagtcatggtggctcatgcctataatctcagtactttggaaggctgaggcaggagagtcgcttgaggttaggagttccagaccagcctgggcaacatagtgagacccgatccataccaaaaattaaaaaattagccaggtgtggtggcacatgccagtagtcccagctacttgggaggctgagacgagaggattgcttgagctcagaaggttgaggctgcagtgagccatgatcccatcacccactacactccagcctgggctacagagtgagaccacaatctcgaagaagaagaaggaggagaagaagaagaaacattttgttatgttaaatttacaaaggctccatcaagtagtgtatgaattttccttgtggtttaatttcatctccgttattgtctttttgtgccatcatggttctcttcatctttaaagtcagccaacaaatatttattggatgcctgccatgtgccaggcatagctctatgcacttgggatgtagcagtgagtgaacaaaacaatttgaaatcctgtaattgtaaaatttaaaacaatatcagataatgatcattgtgtggttcctacataccagaccacatagttatttgcaattattattgaatcgaatgcccaagaaccctgtttaaaaactgaggagcttaggctggacacgacagctcacgcctgtaatccccgcatttggagaggctgagacaggcagatcatctgaggtcaggagttcgagaccagcctggctaacatggcgaaaccctgtctctactaaaatacaaaaatttgccgggcgtggtggcgggtgcctgtaatcctggctactagggaggctgaggtgggagaatcacttgaacttgggagacagaggttgcagtgagccaagattgtgtcattgcactccagcctgggccacaggagcaaaactctgtctcaggaaaaaaaaaaaagaagaagaagaagaggaaagagaagagagaagaagagggagaggaaggagaaggagaagaagaagaagaagacaacaactcaggtgctaagacacttgccaaagatcacacagaaaatccgaaacttgtggccttgttttgaattttattacggtatttaaaaacttttcccctgcagctaaagtgtatgctccatgagggcagggacggtatctacttgttcatcaccataaccctgggacctgaaacctgccactgggttctccagaaatatctggttaaatgacttaaggataatgaaataaatgagcagagagctgaactctggactaattgacaccaaagcccttctcaccaatgtctctactgcctgcatgagtgtccagaaaacaggaagcaaccccttactggatggctcaattgaattatttcagagctatatgtcggttccacttttttaaagagtaggaaaagaaaatgagtctaaaatgagcaagatctgattatttagaagatttaaaaatctttggccggcacagtggctcatgcctataatcccagtactttgggaggccgaggtgggcggatcacctgaggtcaggagttggagaccagcctgaccaacatggagaaactccatctctattaaaaatacaaaattagctgggcatgggggtgcatgcctgtaatcccaggtactcgggaggctgaggcaggagaatcgcttgaacccaggaggcagagattgcggtgagccgagatcacgccattgcactccagcctgggcaacaagagcaaaactccatccacctcaaaaaaaaaaaaaaaaacaaaaaaaaatctttaagcagaatctcctttgccaattctcctgagttttaccactagagaaaacagggagaagccaaagtgccttcacccatgaaggaatgtattccccttaaagggccattcatgctcttgggctggagagtggagctggacagaattgagcttccctttcacttgctgagaaacctgctgtgagtagcctctcatgccagtataaatgggttcatttccatggtaatattttgttatgtattttatagtagttatttccttgatcattatatgctctataccattatttgccactaacctggtgacttaagagtacgatagctgtcgttcagatttattaacctttcttcgtatgtttgaaagtcattatgagtgtactggcttaagctaatagcagattagtaaatattgaaagagtcatcttgccatttgaagtgttttctggctagaataaatgtttgttcaggttgtagccctgcccaggtaatcaccaggtaaaaatacaggatcaacttccagtgctggaacaagcaggataaattactaggtgcaggaatgggttttatggtggctctctcttaacctattatttaggtttatattttaaaggggaattatctatgcttgctcctattacactggacagagtaaaacaaaccaaaagaaggaaacagaacaaaggttacttcaggacaatagttataaaaataaaaccaaacagggtgatcccaaatatcacaaatcgggaggcctagcctgtcatccaaactttattacaatcacaggggtggttctcctctccttgttaagtcttttctgtatgacgagttttgaaagataaatttgccaattgattccttgcagttcttccttcgtgtcacctgattgttttctccatagtcaaattgtgctcttaattgataaccaacatcttaggtcaagatatcagttcctggtgggtttaaatgctttcagtcacttttattttttattttttatttttttatgatggagtctctgttgcccaggctggaatgcagtggctctatctcggctcactgcaagctccacctcccagttcaagcaattatcctgcctcagcctcctgagtagctgggattacgggcacctgccaccatggtcagctaattttttgtatttttagtagagatgtggtttcaccatgttggccaggtctcgaactcctgacctcaagtgatctgtccacctcggcctcccaaagtgctgggattataggcatgagccaccgtgcccagcctcagtcactatttttattttatacataacaacctccctgacaagcctttcttcaagaggatggatccacactaagatcctctaaggaggatcttttacctctgatctcatccttttgcacttctgcaatcacctcttttcccatagtgtcaactatcacctcagcagaaaaatctcagtcttcctaattctcccttcccaaactcaggtggcgattccagctgccctctgggcatctctacttggacttcctactgttgcttgaatctccacatgcccccaaaagaactcatccccaaatctgctcctgtgtcaccgtctccctaatctttgccaaaatcccatggacgatatctccacgaagagttttggatctgtccccatcctgtgagtttctgctgcctacagtcaggtttccatcactcattctttcttggactactttaaatcttttagctggcttcagtcatttccaaatatacccctgtctgcatgctgctattcaacaacctctaaatcctatgtgctagctgccatcaatctaggctccacagccttgaacagtcccatggcaaattagagagaaactccttggcccagcctggcatccaagacactgcacaacaggtccctcccaagggttccttagacttaccctgcatactccttaaatcggagttctcacccttccctaaactaaccagtccttctctgtctcccagggttttctcctggcgtttccccttcatggtatgccaatccccgctccagctttccagatttcgtcaattctttacggccttaaattcaaaaaccaacttttccatgaggtatttccaattcctcctgagagttttccttacaaatcttttttgttttgtctggttttgagacagagtctcactctgttgcccaggctggactgcagtggtgagatcacagctcactgcagcttctactttgcaggctcaggcaattctcctgtttagcatcctgagtagctaggaccacaggcacataccaccacacctggctaatttttaaaactacttgcagaaataggcatctccctatgttgcccaggctagtttcaaactcctgggctcctacctctgcctctcaaagtgctgggattacaggtatgagccaccacactggcacctccaaatctttatagcagataattggtcttattccatcaaactttccttatattcttcttcttaatattgtagctaattacattaaatcatgtatattaactgccaggtgctcactaaatactgcttttattaactatcattatccaaagggagagcactcagccttcccatctctagacccctgcagtgccctgcccataccttcagaaaacaggtgctcctaagattggttgaaatgaaggaccttgtctttaggtgggtccctttgcttaatacttatctcagaatttagaagcagtttaacaatcactgtgctgactgacggagcactaaaggatatcctccattagattaatcaggctctagggtttcagctggaccaaaacagccaaattcttaccgaattattataaagctgctcttggtatggtgaagtccagctgacagggtttcagaacgcatggaaccatgttataagcaagtatccaaaaaagtgaaaacccagcaaatgcagtcacacccaacattttcaatcctaaattcctaaggcagaaagtggcatcgggctacatcccctaatgtctccctcaggttagctgagaggtctcaaacgttgatctcactggatcttcttcatggtaatgactggggagagtaatacaagataagaagatctggtttacctggcctggccgtaacacatgaccacttgtcagataaatcaaatagtctctctatgtggtattgaggcaggaaaataggggctggagggagggaatgtaaggccaattcacacttcagctataacaggaaatatcctctccatagggcatatgcctaaatgactttgtaactttacttcatcctctccatttacatagggcgtactgcaagtaaccatggggattctctcgggggtatttaaactcccaaaaattctgtaacagggcctttgagcccctgtgctcaggcccgctcccacacggtggagcgtactttcattttttactaaaaccctccattctttccttgctttgcacattttgtccaattctttgttcaagatgccaagaacctggacaccctctacagttaacagtgtaattcttaggctcaaccccatttatggtgattctcacaggtagggtggttgtagtacagatagaaaaatggaaagtgaatttcctcttatggaaacatatcaaaacaatctaggggaggccttcactcccaggaattctcagaattactctctaaagctgttgtaaattaatgccttcatagggattagctagtaggtaacaaagacaactaaggtggaaaggtttgtagccaagcaagaaagggcacaaaagagggtaaggatttgtcctatcatccacattactgtttcacatgagctttctagcaagtacatgtaccatgaattgaatgaagagcaacaaggaagtacagttgtttcttttctcttctttttttttgagacggagtcttgctctgttgcccaggctggagtgcagtggcacaatcttggctcactgcaagctcagcctcccgagttcatgccattctcctgcctcagcctcctgagtggctggaactacaggcgcccaccaccactccccgctaatttttttttttttgtatttttagtagagacagggtttttgagacagcgtctcactctgtcactcaggctggagtgcagtggtgctatataaatcactgtaacctccaactgctgagctcaagcatcttcattcctcagactccttagctaggaatacaggtgcatgctgccacactcatctaatttttaaaatttcatatagatggggtcttgctatgttgcccaggctggtctcaaaatcctggcctcaagtggcctttctgcctcagcctcctaaagggctggcattccaggcaggagccactgaacccagccaacagttgcttttggatggaaaagtaaaaagtcattcactggtcaataaacgcaatagttttctaattcacatgcatgacttcctctcatctacttaaatgacacatacatacacaacaatacacacacacacacacacacacacacacacacggccttctccaggtttgcaaagggtgcttactctgcaccagttgccaagaataccttgttctctacagaagctgagtgtaataactatttttctatttgtctggctatctacttgcctgtttcttgccatgtttcaaaaaagacttaagatggcttgtgtggatatgtcatatgacaagaacttaaattagaagtgaaatgaaaatagaaataaaaacaaaccaaaggtaaacccacagcagacaaagaaataactaaaaatcataatgctccacacatctgctaccagcgaaccacaaatttacctctaagctttccagtggccaaatttgaagagaagcctagtcaattacataattcctctctataaaagggattcccaaattttgtgtgcatctgaatcacctgaagagtttataaaactagaatcactgaggccccacttacagaatttcaaattctgtagatctaggatgcgatgctggaacttataatttcatcaagttctcactaatcgctcaggtaataacaaatgaatcactcaagacaacaacagttatttgtgatattaaaatcatataggattttcttccaggaagtggcaaagagaaccttgtaagatacaatgaatgaacacagagatgcgtttcagaggtcatgggctgttgcttacaataaacaataaccttcaagatagacttttacagagctatttaaaagtgattatgttgggatttggtgaaagtgggaccaagacaaaagttatgtttcccatgaagtttttttttttttttaccagtttgtcttgacccaaggtaggaactaaaaaggactttattcagtctcattatctttctaccaagcataaacttaagaaccccttagtaaatatgatagcaaggcatacaaactgcagggccttggcagcactgaggtttatctacaaactataatgtggtgttggaagaatgtaatctagttaatcatatctttaaagtttattctccctcagggcttgaattgtgatggagggaggaagcagagagagcaggaatggaagggactgagttcatcaccactatggcaattgctctttgtgaagacctaagtctgtttttagtgggcccaaatcatctaaagcaagcttgtctatcctgacacccacaggctgcatgtggtccaggatagctttgaatgtggaccaacacaaatttgtaaactttcttaaaacattaagacttttttgctttttttgtttaagttcatcagctatcattagtattagtgttagtgtatgttatatgtagcccaagacaattcttcttccaatgtggctcagggaagccaaaagattggacacccctgataagttctcaatatggtgaagttctcagtatacctgaattttgcatggtcatgtaaagttacattcattttgattttgtagcagaacggacagaaattttattatatttttcatatctcacatctgtccctttgaatctgaagtgaatctgcaagactttggggttcttcatagcttggctttaaaacaaaaacaaatcaagtactagatgggctggtctttagcttttctgggaaagggacaattggggtggttctaggcaatctattatttgcaggcatgcatatattatggctctcaaacctgagtacaagatggcataagagaggtgtcgttaggtattgacacctcaagtattcaacaaatatttatagagggcttgttattaaccaagcactgtactggatgttgagaatacaagaatgagtaaaggaccgcctccatcctccatggtgttcagagggccatctttccctacaagaggcagttataacaaagcaggtaagccgtctgaagaaatgcagagcactcaggagaagaaatatatccacacttcggtggtcaaaggattcttggaggaagctaaaagaaagctaaaaccaaatatgtgggtaatatgtaaatagatattaaacatgtaaaggtaggttaagcctgagttaagatgaggttcaaaggggaaggtaagagagagcattactaaaaaccaaataaagtgaaacgagccagcttgttgtgaaggttcataagctagaagaaggcatgctgcagaagctgaaaaaactccaatctgacctctatgtatgtgaggctagaggtgaaaaggctgagcggcaaggagaggggaccagatcgtgaatggtcttctaatccaaattaaggaatttagactttaccccaagaaaactgagaaaccattaggctggtgatcatgtatttgcatttagaaagattacttgaacctctacatccctcacacctggccaggcacggtggctcatgcctgtaaccccaggacttttcaggctgaggcaggaggattgtttgagactaggagtttgagatcagcctggggaacacagcaagacccagtctctacaaaaaatttaaaaattagccaggtgtcgtggcacatgcctgtagtcccagctatttgggagactgagcggggaaggtcaataggtcaactgagtctatgaattcgaggttacagtgagcctgatggcaccactgcattctaaacaacagagcaagacactgtcattcattcattcattcatacacacatacataaagtattaaaaaaaaaaaacaaatcccccacacctcacctttatgtgtaaggtctgatgagtgatgttgtcaactctgaggtagctggatgagtgctgccacttcgaggtcagggatatgaaggtattttaccagttatgagagactaaataaatgacaatattattacactgctcctcaacgtaagtaatgtatacttctctcatactgtttctcacataccccacctccattacttcatcatccaagcaaacagtttctgaggaaaaagaacaggaaagtgggcatatagtagtatcaaagcaccccctgccttgtatccctagagatatgaaaagctccctgaaaggtaggcaggtatttgtaaacgtttttattagtgagtcaattatttaatagggatattaacatatattgttggaaaagtgttctcaggtgtgataaggaagtattttgttttctatatgtttatgattaataaacatattttaacagctgaacctttaagacaactgaaatccaagccatagtgtatacagggtgcctacggctctgctgaagggaatgctagttaacccatgacctggagtaattcaatttatgaagaattctcttggttttaatactatattactaaactcaaatattggctaatgaggttatttgaagaaaaaataaagtgtttcagaaatggaaatgtttaatatgattccctgtgtgcagtttgccatctagtgttaatttgtggaaataaaaaaggcaggtataataatttccaagcaggctcatcaggtggcaaaggcatggctcacagcaacatttccttgtaaaggtatcaagtcataccctaagaccctctgaggtttgttgaggtgggtgagtaggtgagttggctacttctaagaaatcagttattcttggaaaacaaaataattctcaatcctggctgcctgatattgttacctgaaaacttaaaaaaatatacagatggccaggcgaccctccaaacctggtcagtcagatccactcaggagggaccccagcagtggacggtctgtaccctccccaggtggttcccatgtgcagcttgagggggaggatccctgggcaggggggttaagattgcacaccctcgctgtgtcactgcaggagtgtcaccacttacctgtgtcaccttagcagggaaattgggctaattaaatatgtgctttggtacaatgaaaataacttctcctggtgttattgtgaggtttaattatcatcatgaatatttagtgcttaacacaacacatggtacagtgcactcaacaaatgctaaatatcataaataacattatcaaggaaaatattttaagagctatttagaggaagaaactacctaagaaatgaacatattacatatgacatattagaaattagaacatattacctatgaaatatttccattcttcttaaacaggtagccttgtggaattgaatgctgacacccagctcaatctgaaggatgcctcctgagacacatgttacttcttatccagtgctgacctaaagtgatttccaattatttccaatctgtctttgggttcaaaatttccaataccctagcaaatttcacttgtcttgttgagtcagatatcctcttctgaagtaaacagagaacagagtcacaccaactacagacatggtgacagtaagcacagccatttgttgggagcaattcccagagaaaggagaatcactgtgactttatcttcacactcataaaaaaaattaacctattattactgtaagctgttctgggcagaaggaatatcacctgaaaaagttcagaggaggccagtgaagagctattggtccagtctggcaggagtattcagtgggaatgttaggtggggtcaaatgataaaaaaaaacttggctatgaaaaattggatgtgaggactggggaaagagaaacatcaaatatatcaaatgctaaacttgaaagggcagagaaaaatgaaaacagttgagtagcagaaaattctgagcaaaaattcatttgttttatttgagacatattgaaatcaagtagaggatggtcagaagggggcatccaggaaggagcagggcagagcagaggcagtggcagggaaggggtgaaattcagaaagaaaatatgggctgtaggtcaagattgagtcaatagaatggatatgatgattgaagtcatggggcatgcatgagtttccctacagtgacttgatagaagagaaaccaccagcccagcccggtagcgcaggcttgtaatccagcacttgagaggccaaggggggaggatccttgagcccaggaatttgagattcagcctgggcaacacagcaacaccccatgtctaaaaagaaaaaaatttgtttaaattagccgagcatggtggcacctgcctgtaggtccagctactcaggaggctgaggtgggaggattgctggaacccaggaattcaaggttgcagtgagccatgatcaagccactgcaccccagcctgggcaagagtgagactccacctcaaaaaaaaaaaaaaaaaagaaaaagaaaatccatctgttactggtagacttttgcattgtttaccgtttagggctcatataacagaatgctactacgaacatagctgtatgtgccttttggtgatatatgtgtgcatgtatgctgaataggtgcagaggaatgaagctgctggatcctatgacaaacagatgattagctttagtagataccaccagagtttcctaaagtagttataccaatgtacatccccggcaatagcatatgatgttggggggttatttagtttatgtgttcactggatttattatttgctttagccattctgatgtatgtagtggtataagattgttttaatttgcatttttgggatgacaaataacattgaacacttttattttttattgtttgaatatataattttgtggagtatgtagtaaaattatttgcctattttgtaattggatcttttttttttgctacataggagttatttatagcctcattataatttctcagatagatgtattgcaaactctgtgggttgcccttctctcttaacggtgtattttgatgcaaacctattaatgcagcccaatttgtcagtctttctttagggtcagtgcttttttgtatcctgttttttgtaccctgtctttgcctaccaaggacaggaagatatgctatcttctagaagctttctttcaccttttatttttaggtctaggatcatctggaattgatttgtgtgcatggcatgatgggaccaatattctatgttctcctttaatatggatatccaactgcttccataccacttattgaaaagacgatcatttccttactacattgcaatgacatcattttcatcaactagatagttctatacatttgggtttatttctggacgctctgtcccactggtctatttgtctagccttgtgctaatatcactgttttaattacagagctctacaagtcttggtatctagtggtctagtcttctaacattgctcttctgctttaaaatggttttagctattttgggctctctatatttcatatacatttcagtcctccctctttactccctcccccaagcattactgagattttcttaaatctgcagataaatttgggaaggattgccatctgggcaatattgagtgtcccaaaccataaacatagtatattatgccatctactatgatcttttatatttttcacagcaatattttggctttgtagtttttcctgtgtggagtttttacatgtttgtcagaacaatttctaggtatctgatggctttaaaaaacattactgtaaatgctatcttcaccaaattctatcttaagtattgctagcttatacaaatgcagttaatttctgtacactgaccttatctctagtgacatcactaaagacactaattctaatggtttgtctgcagattcttttggattttctaagtggacaatcacatagactatgaaatatttttatttctaacagtcaatccctctatttccctaatttccagctaaggttatagatttccctattagcagtacttttaccagtatctcatacattttagtacatttataaaacaaaggaccattagatagttgaggatgccaaaaaatgaaagagaacaaataaaaaatacaaccaaagaacaaaaagcaactaaaaattgaggaacttgaaagggacaatgcaggacctagaatatgttttaaaatatataaaagaatatcatagaaagataacatatttagtcaatgaaatcagaacacagtgattttttaaaagttaataggttggaagataaagatatggaaatctcctagaaactaaagcaaagagattttttttttgtttttttgtttttttttgagatggagtttcactcttattgacgaggctggagtacagtggctcgatctcggctcactacaacctccacctcccaagttcaagcgattctcctgcctcagcctcccgagtagctgggattacaggcgcccgccaccacgcccagctaatttttgtatttttagtagagacgaggtttcgccatgttagccaggctggtcttgaactcctgacctcaggtgatccacctgcctcggcctcccaaagtgctgggattacaggcgtgagccactgtgcccagctgcaaaaagatgttaaacagaggaaataagttgataaatatagaggattcaacaactgaataacagaaattctagaaagagaagaaagagactaaggaaggggggaagttaccacagaaacaaaacccttaagactggaggaatttccagcacaaaaagacacgaaaaattaacacaaagaatgaaaaagacgtaagtcaatgatcatcacagggaaatcagaaaactctagataagagaaaatcctaaaatcttcaacagaaaagagtacacactgatggagtgaccgtcacaacagtgtctcatcagcaatgctgaaagctctgagagtgaagcaatgctttaaaaattccgagggaaacactgctgcaacctagagttctagacctaggcaaactatgaatgcagcaagcaggaatagacatctgctgataccagagatcacaaaattttacctcccaagtacctttcacaggaagcacttggaagatgggctcatcaaaatgagctaagaaagacccaggatatggaaaattcagcatagaagcagaggcaagccctgaaggacagtgcagcatacccagccagaaaccagttcaaacagaagaaaaggaaaagggccccaaaagggctatctccagagagaaaagaaaatagttctcacacaacagaatacttaagtatggtgaaccaatggaaaatcctgggagaaatctgttaatttcagaaagtataaaaagttgcacaggaaagaaactgtaatcataacacactacttgctagctaaccaattaataaaagtcgtaagttaaacaatggacataattttagcaaaaaattttatatatcactattgtagaaggatggaaaagaggacagaaaagcaactcatggggtctgcttccataataccaagttaactgagatggagtgaagccaataaataaagatttagtagaacatatctatccttttcaaagatggaggtaaataccagcaacaactgctaaaagagtttgaggagataaactagggtgggatagaatggaacaggaaaatgctggttttcattctgaactgtgtagcagtatttgaaattttaaactatgtgtgtgactaaatagacagtaataaaaagtacgtattttttctaaatgaggcagggtaaacatagggaactgaggtaaaaggaaacagtttaaaataattatttttgttttcttcaaacatggtattttaggctctacactagatcttaaaattaaggacaaattagtcagaataatacatatcccaggaaaacttctgacttagcattgtaaaccaattctaagaatggctggtaattcataacaaagccaaataatgcttcacaagtaagtataggatagaatgaacacaatttcgttaaaaggcaagtacatatattttatgtgttcaagtacatatatttatgtatatttatgtatgtatctgtgtatgtatccacatgcagaaagataatataccctgatacaaaatatacatgttaagtctaagaagtcctgttactcaaagaaatattttcaaatattattagataattcacttgtcgatcatcctttttcagcatctaaagaaatttcagacacaaaatatgcaactgcatttagaataaacagatggaaaagctattgtagaaaaaaatataggtttttagaaaagttggaaagattacaggcaaaaaataagaacatatattaaattacatttgcaagtttcaaatatttgtaactcaacacaaaaacctctaaaagtatgttgggtgcaatggctcacatctgtaatcccagcactttagaaggctgaggcaggaggatcacttgagcccaatgagaccagcctaagcaacataggaagattctgtctctacaaaaactaaaaaattagccaggcatggtggcatgtgcctgtggttccagttactagggaggctgaggtgggaggactgcttgagcccagaaggttgagactgcaatgaatggtgatcatgccactgcattactgtttgagcagaagagcaagacactgtcttcaaaaaacaaaaacaaaacaaagcctctaaaagtagtttgaactattaactttaataatgtaaatatcatggcctggctcggtggctcacatctgtaatcccagcactttgggaggccaaggggcctggaaaacataggaagatcccatctttacaaaaataaaattaaaacattagtagggcatggtggcatgaacttatagtcccagctactcaggagactgaaagaggaggatcacttgagcccaggaatttaaggatacagtgagctatgactgcaccacagcacagtcagagacagaccctgggcaacagagcgagaccctgaatctaaaaataataataatgataatggtaataataataaaaatatcaatttaaagttttattcatgatcgtcttattaaaataaatttaattgcaaaaacaacctgtcttagaatacagtatcagatgttttaagtacatgtgatcaacagtacaaataattatagcagtcaaaccttagtatcacacatacttaatatattagatatacacaataataaaatcactccctaccttgaaaactttacagaagcatttttaattttacaacacaaagctcaaacgaacctacaataagtctagtagtctgtttacgtgccaagggataaggctgaacaataaattaaccctttaaaaatgtctatgaacaagtacaattttctttttgagttctgcagagcaatgaccactaagaaatatttttaaaggctgaacagaatccagcggcaatgaagttaattaaataagaagactaagagaaaaataaacagttcaatattaacaatacagtatatttgccagcacaatcaaatcagtataaacacctttaaaacatgaatactgaacttagtaaaatgttatattgtatctaattatgtcagatatctgatgagagtgctttttattatagaaatagtttcttctctcttacacaagactttaaagcaaatccaaacagacaatttaactgttttggaaaatgtattcactgcagaaatgcccacaataagccatgctatctgatggtatggtaatgtgaaatggcatggtaacgtgaaataaaaaaaatttaactagataatttttacttcaaacctgaagcaaaagtacagaatgctgagttcattactttatgtatctattgtaactaggaattactacattaaaaatattcattcttacaatgtttgtttttagttgcctagatatgtaatgggccaggtgctatatgaacactgaagaataaaacaaaaaaggttctctgcaaagaaaaaaaagttggcctagggtactcagtatatccttacaaatttaattatatatggtttttgaaactaaagagaaatgtttttccaaacagttaactttctaagtgggtgtctctgcacctatatactaagtcaaaatttcaggggaccatagatatttagaaacacaaaattgctaattgactatttcagttgatgttatatttatcaactgtacttcctgggtatgtttcctaaagtacattcttacatgcaaaattttttaaatcagtgaaacaaacattatgtcaattcttgcaaacctagacatagtaaaataagaaacaagttccaaatttttgacctggacaaagagaatttaaaccaagcatatcatacatccaaaacacatatccattgatgagtcaccaaatctggggaaaagcaactgggattgactatgaggctgccttaattaatcttcgtcgtctcgttgcaaaggtataacctgaatttctttagctatcctttctgctaatattctattatttgcagcaattactcttcgtgacatcaaatcaaatggtccacctaaaagcaaacaagtatgaaaaataattttatctggtacaaaaataattcatataaaacaagtatagcaatatgtactatggtcacataacattttaatactttcagttttcttaaacaaaaatctactgttacatttctacaatgtataagcttagacaatatataactgtttctaagcataatttttgagtaaataatgaagtcataccagttagaaaatgtcatattttctctatttttgtgcattcttattacctctttattgtttaagaatctatggacagaaaatgtgaatccaatgcattttcataccactgtccttcccatttccttatttctttgttgcctttctcccagatcactggtgaattctttcagcacagattcacccttcggtttaaaattttcaccatcagttgaaagcaattatttaacttctctagtctcaacacagaaagtgatggtggaggaagtccatcatcaactatcaccattgtcaccattcaaagagctctgggtataagcctcagactcggtgactgtctaggccaagggtgtcgaatattttggcttccctgggccacactggaagaataagaattgtcttgggccacacataaaatacactagcactaatgacggctgatgagctaaaaaaaatttttttaatcgcaaaaaactcattatgttttaagaaagtttacaaagttgtgttgggccacattcaaagccatcctgagccacatgtggcccatggactgcaggttggacaaacttggtctaggctttttctacagcctttcaggagtacctgaaactcacactagaaaaggattagccatttatcattgtaagtctcacattaccattacctcttatccttacctctatctcctaaagcttattttgattttgcacacaattatatagcttgtttctgcttcaaaaactgcagtataacatatatcaaaaagttttttaaattctacatatggacaaaagtccaacagatgtgtggagatctgcttcactctccataattttacctgtaacatccattagcacgccaccagcttcagtaacaataatgccagctcctgcaacatcccagcagtgaattcccatttcataatatgcatctgctccgccagttgccacaaggcacatattaacagctgctgttccaacactccggatcctaacaaatagaatttagaaataaaattggaaaaaataatcctttcaagtaagatattcctccttaacttcactttaagtgtcgattgaagaaacttggaacgatctagaggataaagattttaagaggtgatatctaattgtaaaataaaaatatgtataaatctaattatcatcgtatattatataaatcacaaaaccctcacaaagcaataatttaataagataaacattaaaacaataatttttcataaaaaataaagacaatgcttaattctacaataatgaaatgcaagtatattaatatttgtctaaatccagctactaaagcttatattattttacacacatatacacatacccacaatgcaaatagtctctaggaggtgtaaaatatcatggtatgggtcattttcaactgggtgtgcgtcatacatgtgcctaaagcaacaacagcatgccaggctctgcaaagacctaagcctgccttggaaaattactgcaggtttgccctctcatagcacctcttccttgaatacaagttaagttgaatataaatacacttgatagcaattatagtaataatttattcagtaaagaatcaatgttaaaattaatgggtgagtctgataatttacagagtgtcaaagtgtctctccacaagatacataataagtacaatggaaaaatagcatctttacaatggtctaccattaccaagttatccaagttaatatcactcataatgggacaaaaagaaatgtgcctgataaaatgcactgagaaggacagaacattacttttgcggcattcctgccaaaaatccatgatccaaatataatcatgaggaaaccagacaaattcaaattcaagagacagactacaaaataattggcctatacttctgaaaaatgtcaaggtgataaaagacaaagactaagcaagttctaaattaaaggaaattgatgagaaatgacaactaaatgcaatacatgactctagactggatgttggattaaaattttcaaaatttgaataaagtcttatattagattatgtatccatgttaattcccttacttttatcattgtactgtggctatgttagacaatgtcccttttattaaagacacacacgctgaaatgtgtatttagaagacaaacgtcatcatgtctacaagttactttcaagtggtttttacacaaattccttctccaactgtttaaagcgatggtaataagggagtgagttctgttcaatgagatctttcacagtttatttatttaaaaacatggaaaactgatgactaatgtggcatttgttttatatctcaaaaataaaaataaaaaaattgcacctaagtacatcctttatgccaaataaattttaaaaaggattagaataacatgatgtcattgatttggcatgttttccatcatatgtttttgaagcacattaaatttgagaaagtagtagtaagtgcaccaaatttccacagatgtttgtttcccagataaataaaatcaaattaactttagtggcagttttttagttataaagaaaagtgcatttccccacttctcccatgagatatgtgatatttgatatctcatatcatagaatgcaaataccaaggtctttcataattaattccctggtactctattcagatatagaatcctaggctagccaaacaacagtgatatctactagcggtgcttccgtcacttctaatgagcaccatgggatctcaagcaaatggtcttacaatcagcaagagaatattcttttatggaaaatactatgaaaggattaccaaacagattacttaactaccagataattaagactatggtgtagattctgcactatgtgttctgaatcctatcttatgtggtcctcctatacagctgtggtccgcctatgcagctaacatggcacattgtaaaaaggattatgtttgatgtcacaaagatttgagtttgctcccatgtcatgtcatcaaataaggattccaatttactttagacaaatgtactaatgactacagctaatatttgtaaagcacctagcagagtgcctagcatataaaatgtccataataaaaatagctttttttatgataaaattgttctctaaaccatgatgtcagaaaatatcatataccatacatagtgaatttcatctacatgaattcctgaaaattaaacaaaggaaattgatccagaataacgtactttgcctcataaatgttggttcttaggaacctattagactatttctgcttatttaaagcattcattcagattataactctctttagtttcattgttttgtataagtgattctgaaatcccactgcaaagctgaagaatcagctgaatgcaaaagatcataaaagcaatcagtaagtcagtacttcttagtaatattttcctggttatacttttgaaaaaaatctgaagtaaaaattagtttttatttcagccaacagcaaaattaaaggttaaagttgtaaacctcttgcaactcgtttatgagtaacataaccattttatagcccatggttaaagtccttgcttcaagacagcacactgtagcagcaagtttattgcccttctctcaagggcatcattctgggaggttctgtagctattgacagaggctctcttttactttactcattactatatagaccacatatgcatagtacataattagtttgtacatggtcaacctatattttgaagggtctgacttctaagagaagtccaatattgaagaaacagaaatgatctgggagccaggattctagccctatttctatccagctgtgcgatctcaagcagccacatcacctacttgaatctcagtcaactcacctacaaaataaggctggattattagatgatctttgatcagttctaggactcttataactcattgataatattttcacaaagaaaaagacagaaatagtaggtggtgaaaatattatgttgttatttacattcaccagattttgttcaataaaggatttttattatgatttttcatataaacaactatggtcaaagaaatactatttaatggcggggcgcagtggctcaggcctgtaatcccagcactttgggaggccaaggcaggtgaatcacgaggtcaagagatcaagaccatcctggctaacatggtgaaaccccatctctactaaaaatacaaaaaattagccaggcgtggtggcgggcacctgtagtcccagctactccagagacaaaggcaggagaatcacttgaaccccggaggcggaggttgcagtgagccaagattgcaccattggactccagcctggcgacagagactccgtctcagaaaaaaaaataaatacataaaaaataaaataatatatagcattaactatattaaagttaaggacctcaaacctttagcttttcttgaagatttaaggataaaagtaaggataaatatttccttttaatttcttcatttattaaactgtcattacagagggactctgagatttggagaataataatagcatgacgattttgaaactccctgtataccctcctggaaaataataaaatgaaatcaaccaggaggacaaataaaacccataggacccattctttcagatagaaatcaggaaatgcaaactctcaaactacctctaagtagaagaaaaacaaataaataaattctaacagagcaccggaagcccgtagatacacagagtagggcagagaaggcagaaaagactttgtgagaaagaacaaggaggagcagaggacccacagggaacaaagacaaaaccaccctcagaaaagagtcactgagacaataaacacaaaaacaaaaacactgagcacagatcagcacttggtaattcatagtcttggctagaggtaaggggctagaaaacactcagaacctgaccaggcagcctcagagaagctgtgattctgaaggagaatcaaataagatagcagagatggtactccttggaaacaagtgaaggaaaagtaggaactaaggggtgcggggacgggggagggatagcattaggagatatacctaatgctaaatgacgagttaatgcgtgcagcacaccagcatggcacatgtatacatatgtaactaacctgcacattgtgcacatgtaccctaaaacttaaagtataataataacaaaaaaaagaaaaaggaaaaaaagaaaaaaaaaaagagtgaaaacttaaggaccctgcagaaatgaatgataaacaagacaagccaactctatctacaaccagcaggtattcataaaagaaaatgcacagaaaggcacaactggcaaaataagaaattcagaaagcaggaaccctgatcacaaaacgaagtgaaaatagaaaaaagtagaccacattcacacaaaactactgcaaaacatcgaacgctgttaataaaatggttttgttttttctttttgctgtaaagtctctcccccaaaaccaacaatgaaggggaataaaatgaatatcaatcgaatccgaattaaatattttcaaacaaaaacttgtgaatactgaaaaaaatgttacatcagcgatatagaaactaagagcacaaatggaccaaaatacgtacataaaacaagatgactgaactcaggaaagaaatgggggggaaataaaagacaaaattatgtcaggaacgaagaataaattacaaggtgccaataaaagaacagatgataagaaaacttaataaagagaaattaggaaaagcaataaaagaaagaagtaaaaagagacagagagaaaatggctgaaatgaagacacaaaggagatggagcattcccactggtgtctttaaagaaaaaaataacagaagtgcactagtacttaaactatatcttaaggaaacttcccagaaattaaaaagacatgaacctatatactgaaacacacgactgacccagaatgagcaattctaagatatatcctttaaaaactgttagccaaaaattcaggggaaaaaaaacagcctccagttaaaagataaaataatgtaaaagccaagaaaaattagatttgcatcagatttctcaaaaacaatatacaaagcaaggcaacagtgaaagaacattttcaagaaatttatactttcattaaggatactatatccagccaagctgtccttcaagtctcaaggccacagaaaagcattttggaaaatacccaaactcagggaaaactgtgcacatgtgccctcccccaaggaatctactagaggacgaacttcaaccaattaaaaaggtgcctgcaacacttcacaaaaggactgtgagcattttataatgttaaatgaagaactaggatcaaaaagcggggtcatgggttgaagaatatgtaaatataatatgttctggcaaagtagacagaatgcaactttaaaaatgggataaagagagagaaaaggggaatgggagacttacataggcaataggcgaagccaaaacattctagatagtaaatagttaagtaagaaaataatattaaaggtactataaaagttgtattacaaaagaaacctgctggaataaaatgtaatctttataaatacaaaaataaattttaaaagaggcagagaaggcacatcaaatgaacgcagtaactataacatcatacagacagtaattataccacacaataatacaacagaattgagacaaaaacagtcatatcaataaatcaataggcctaacctatctgttaaaagaaaaagattttcaaattgacttataaagtgaaattccatgcaatgctgtatatgacaggcacacttcaaatgcagtggttcaaaggactaaaaataaaagggtggacaaagatttatcaggcaaacaggaaaaataagaaagcaggggccaggcacagtggctcacgcctgtaatcccagaactttgggaggcagaggtgggtggatcacttgaggtcaggagttccagaccagcctggccaacatggcgaaaccctgtctctactaaaaatacaaaagccgggcatggtggtgcgtagctgtaatcccagctactcaggaggctgaggcaggagaactgcttgaacctgggaggcgcaggttgcagtgaaccgagattgtgccactgcactccagcctgggtgacagagggagactctgtctcaaaaaaaaaaaaaaaaaaaaaaaaaaagcaggaattgcaattctgatgtcaaagtaaatttcaagcacaaaaacatgaaacaagacaaagaatacgtaaaaattacacaatgaactacgtatgtaactattatgaataaacatcaaataacacagcttccacctacataaaagagttgcaaggagaaatacagagaaacacactaataataaaagactgatacatcagagactctcagtataagacagggcaaatagacaaaaaaaattaattaggtaaatcttttggctatatactgaatgtcataccctggaaatagggaattatactatttttcagtgcatatgaaacttacaaaaattgatcacagaacagggcacaaggaaaccatcagtaggtttcagaaagtagaactgttaaaatgtaataaaactggagattaaagatgaaatttttaaaaatccaaaaaggtgtctgctatggttgaatgtttgtcccctccaaaacgcatgttgaaacttaatccccaatgtggcagtactggtgtggggtccttttaagaggtattaggtcatgagggctttgccttctaggttcatggcttataggttaagggtggggtgatgctgattaacaaacagaagcggctttgaaatgggtaataggtagaagacagaagaattcagaggagcaggctagaaaatgcctgcatttccgtgaatgaagcattaagggagattttggtgagggcttagaagacaaggccagggaaagtttggaatgccttagagattgagttaagtagctctgaccagaatgctaataaaaataggaacagtattctgatgtggtctcagataaaactgaggaacaaggtatcggatcctggaggaaaggccatcctggttataaactggcaaagaacttgtctgaactgtgtctatgactaagggtttctttttttttttttttgagatggagtctcactctgttacccaggctggagtgcagtgacacgatctcggctcactgcaagctccgcctcccagtttcacgccattctcctgcctcagcctccggagtagctgggactacaagcgcccgccaccacgcctggctaattttttgtatttttagtagagacagggtttcaccgtgttagccaggatggtctcgatctcctgacctcgtgatccacctgcctcagcctctcaaagtgctgggattacaggcgtgagccaccatggccagccaacttgacagggtttcctgaaagcctaaacttgagagtaatgaattagggtatctggcagaaaaaaatttctaaacaaattatagaagtagctgcatggttacttttgaccatttatgctgagatttgcaagcaaagaagtaatttaaagacaaatgaataattaaaggggaagcagagtggccagatgcagtggctcacacctataatgccagcattttgggaagccaacttgggcagatcgcttgagcccaggagttggagatcagcctgggctgcacggcgaaccccatttttatacaaaataccacaaatataaaaattaactggatgtggtgatgcaaacctgtggtcacagctacttgggaggctgaagtaggaggactgcttgagcccaggaggttgaggctgcactgagctataattgcaccactgcaatccagcctgggcaagagagtgagaacccatctccaaaaaacaaaacaaacaaacaaacaaccaaaaagaaaggaagcagagcaaaaaaatttggaaaactcagcctggccaagagtgaaaaggtgtgttcaaaggaggaaaccgagggttagccaggaaccatttgctaaatagattagcacagctacaagggagccaggtgttacttctaaagacaatgaaagaaagaacccgaaggcatttaagagatcttcaaggctgcccctccctttacaggcccaaaggagggtagaatggtttcatggaacaggcctgggatactctccaatgctggctgcccagggccaccctagactgtgctccctacatcccagccaaggtcaagtgaccctaggtgtggcttataccacatctctacaaggtataagttgtaaatgttagcagtatgatactaattctgcaagcttgcataaaggaagagctgtagaggctttccagcctccacttggcctcaaagattgtcctcagaagcctgggagccagggaacagacttgtctcaagggcagagccacagtggaactgtggggttagtggtagctgagaatctccaccaaggtaaagcctagtagagcccaggaagtaaggccaccacagagagtccccactagggtaatgcctaactagtggagccatgaaagcaggaccactacctgggcctcagaactgtggagtcaccagcagcatgcaaggtacaccttggaaagcttcaggcactggactccaacccatgccagtagccatatgggctgtaccctgcaaagccacaggggcagggctgccagaggcctttacccagccctcaacccccagtgtctccatgaggtggtacatgcagtcaaaagtgattattcttgagctttaagatttcatgtctgccctgctggaattctggacttgcctagcgcctgttctttctttttgcctaattttccgttttggaatgggaatgcctgtcttatgcctgtgtcactattgtatctttgaagcagatagcttgttttgatttcacaggctcacaaatgagactgtggactttaaacttttaagttcatgatagaacaagtgaagactttgggaccctggggatggaatgagtgtatttgtatggaaaaagacaaatctggggagtgtcaggggtggaatgctgtggtttgaatgtttgttccctccaaaactcatatggaaacttaatctccaatctagcagtactgaaaggtggggtctctaagagggctatgccctcatgaatggattaatccactcatgggttaatagattaatgagtcatcataggactaggactggtggctttataaagagaagaacagagacctgagctagcatgctcagccccaccatgtcacattctgtgctgcctcaggactctacaaagaatccagcaagaaggccctcatcagatgcagctcctcagccttgggcttctgagcctctataactgaaagaaataaattccttttctttatacatacacattaccaagtttcaggtattataagcaacagaaaatggactaagacagactctccttgtgaaaatttaagaatataactctcagtaaaagaggaaatacaagcaaattacagaatttatgaaaaaaataatgaaaacagtaagtatcagtatttatgggatacaatgaaaacaatgatcagatgaaattcatagcctaaatatctacatcaataaacataaaggaattataataaattttctaatcaaaaaggaaaaaaaaggaaacaaaccaaaagaaagcacgaagatgaaaataatagtgcagaaaagaaaaaaccagcttaaattaaaatcctggttctttgagaaaaaagaacaagaaaaaaagcacaaatagacaaaataagtgacaaggtggaaataaccactgatatagagaagccagaaattaattataagagtctatcttacagacttctatgcaaataatttgaaaacttaaaggaagtaatttcataggctgtggaaatgttccagatcaaagaaggctaaggagacatgacacctaaaaataatgctgactctagactgaatcctactttattggaaggcaaatgctataaaggacattagcagattaactgacaaaactgaatatggatgacaaattagataaaaagtgtatttatgaaatcagtggtttcatggttatggaacagaatctccctattctttagaaaccatgatgtatataatttactctaaaatggtacaggaaaaaaaaaaggtgtgtgcacacacacacgtatacaaagagagagatagaataatggtaaagagcttacccatgaacaggaatgcaaaaaagcttttccatattagaaagaaccattctcacagtctctggtgttctggaagagcccaactcagtcaccaagagagatttggtaatatctaaaaagaaagtgttaggtttcaatatttagacttctagaaaatacctgacacttgtaattcagaagagggcatttgtatccctcttccttgttttatcgtgtttctttataagcatttaaataataaaatactgataaattaattatccctatgtgatcctttttataagcatcagagtccagctgcttaggcccttcctgaaaaagtacataatgtaaccaatttgcctgcatacataatacttagtgggaaacagcaaatgtcttaaatatttaaaaaggagagactaaattcaataagggatttatgtatagatttggaagaaaacaaattacagtaaaattacagtaaaagtaaaaattttacttttacaacaaaagtaaaattctctgacatccatttacaaggctgacaggttatccaaggttttccatttgaagctcaggacacacccaacaccctagatctcacctcctcccaccaatggagatgtatgttcaccagctgtgtttgatctgagcatttctgtaactgttgtactacatttaatagttacgtaatttagggctgggcatggtggctcacacctgtaatcccagcactttgggaggcggaggcaggcagatcacgaggtcaggagttcgagaccagcctggccaacatggtgaaaccccatctctactaaaaatacaaaaaattagttgggcatggtggtgcgcacctgtaatcccagctactccggaggctgaggcaggagaatagcttaaacccgggaggcggaggttgcagtgatccgagatcacgccactgcactccagcctgggcaacagagcaagactctgtctcgggaggaaaaaaaataaaagttacataatttaatactttgtaaagtgaagaatgactatgcaaaggaaaagagttgtttctatcaaagctaccatattccttcggtccaagatttgtattttctcacatgatgacatctagaaaaataagaatgcatcctccatttcatggggtcttagattttaatgaaaaggaaatagcctaaaaatctgctcttaaattaagtgtttgagggaaaaaggtataaaagtctagaaagattctaaactcaaattgttttgcaagtacctctaagttcttgctgcactgaaaagaatttcaatgtgcaaactgtggaaaatgtttggtgtggtttatggaagaacagtaactcaaaacctcaataagctgtgagaaagaaaaagaaaagttttaatctgcagaatgccagtacctttaaattatcaagcctgaagaggcatttaaaatataccagcagacagtctcactcccctggagttaaataattgccacttgaagccgcttgctacagggggctctagactcactgatgccaagcagccataaaatgccatgcaccctataattcaacagtgtatagccaatcactaagcaatgttatttctgtaaacaaatgagaattcctgagtacaacttttctcatcatcccctctcccagtgtgtccctttttctttaaaaacctgagcctctgctaagttctctggagcactctccaaggtaatctagaagtgtgtcctgggctgcagtcctcaactttggcccaaataaactctctacattaattttgcctgcacttccttttttgaggccaacagatgtaatagagaagaaagaacttaaattgccattcagcttataaaatatatatgtctcattttcagtgattcccagctttaacgggctttttttccacccatttactttgtagtaattggtcctggggcatcagatcagaggaattctataaagaattttagaagcagtagataaaacataaaccatgaattccacaaggacagtgtgaaaggaaaataaatctgaggacccaaaaaacactaagccaagggaaaagtcaagctgggaactatgtcaggcaaacctgcctcccatttaattcctaaataagacacctacaaagacaaaagagctacatacctcccttacaatttgcccacaaggaaattccttgtggacctcaagatctttaccctaaaacagttctggctgaattttgccctggcaatgtagactgatagcttatcttcacaggtgtgggagagaaagtcatccctctgctcgcctgagacaaattcatatctgattgcttcatctgccctattgtttatgtaaaaatgcagattcactgagccagactcaattgtgtatttaaaggctgattacggacttaaaagaatataatcatttgtcttttatctacctataacctgaacaccgcccccttccccacttctagttgtcctgcctttatgtacatcttacacatattgatgtttcacgactccctaaaatgtataaaaggaagccgtaccccaaccacctcgggcacatgtcgtcaggacctcctgaggctgtgtcaccttaactccttaacttcggcaaaataaacttctaaactgattgagacctgtctcagatattttgggttcacaataggaagccagtcttaatcatcttcctatctctatcacaaaatacaatgctgagcctgaagtgtttgctcaattacatttctttccctacttccattccacattcaaagctgaagtcaaaaagaataaagagataataaacacaatttatgaatcagttaacacctggagaattccataggtgaatattaaaaaacaataaaatattgagcacacaatatgaatagcatcaaaaattggaattaatcctaccttcttgttgtgaaacttgtagtttttgaccattacaaaaggcaccttttccttttctggcagtgtacatcttgccttccacacaactgtacacaactccaaattctatctgcagaggaaaacaagtttcctttaccaaacctaagtatgtttcatccacttttttctaagaaaataacaagacaatctggtatactgactagtaacaatggactgaaatggctaaactgtgggatacttaaaatgttaatttccagactaatcaagagaaagaggtcaccagaactgatatccttgactctcctcccatccaagtccagatctaagaacacccaccttacttctcttcctcctgcttcggaagacagggctttcctattttctaagtgaacgcttctccggtgttaggactcctaccctcacatacattctctgaaaaactgctccatcagctgattccctagtctcttggatttttcttcttataccttctcattaagtttctctcctccttacaaaacctttgaaatgttattctatccttttcccttcactgccaatgagtaactttgcatctcctattctcctcttaatacattacaatgtggcttctgccctgatcactcattcttctgaaagtcccacaaagagagtatcaacaaactttctttgttgcctcaaatgccttgtctgaagaattggagtctactggctcaagacttattcaatacttaattcactacctccatgctcccaccattattctcttagttctacctcacctactaattcgtttcagttatgattttagaacattcttttctgcctcaccctgaaaagttaggcacctcaggcttttttcttccttctcccattgcttccatttcccttttagctctccatattcacacaggttggttttttacagtccacaaattcattttggctcccatcaacctcataatcgggggaagaacctacggttccaaacctagtcttgcagaatttcaaagacaaaatcattcattgcctgatcacctcccattccttccccataaatctccttcaaatttaatctcaaaaacactttccaattttggcatttccttggctattctcactgcctctacttagttcacccacaccccagtataatctctacattgctagaattatctgtcactttccacttcaaaacctctactggttcccaactaccttgaaacacaaactaaattttcttgcatggactggccacagtgcctcacagcaaggccaaactaacctttgtcctggccacttgcagtgcttccctctccatgaacatctcaccattccccacacgtataatggtcttcaatttctccaagctgttctttctgattaaaacgccttcctcttcccaccacccccccacccccgccaatctggaaacccctagttttctaagggccaacacatgatcaacttctaagacccctgctgttatgaagattttcccaacccactctcagcagaactggtgacatcctgtgttcccatagtattttttttcatggttctaccacatatcatctttacctgttcacacatctaactttgtgctgagctgttgagttcagtggcagggccagcatacagcccagagctgattatatactgaaagctcatgtagcttcttctggacattctcattaattaatacaaccctggggctaagctgtcatttgtccaatatgtgttttatattcagaaatgttataactgctgttatacatgttgatcttacatatcaaaagttccttgaagataggtaggtaaaatgttagtaaccatcctttactgtttgaccaactaaggagccaaacagcaaggaaatgctatagctatatgttttattctgctaggctttagatgtaagtatttacacataagacaacctgaactatgtgtaggttcctaaagagagtctgtattttccaaccatgctttggcccctgctacttgctggtttctaaatgtatttcttcactaacacctactaaagcattcccagctcaaatctcacctcttccacgaagcatttaagatcacatataaacttctatcccatctgactctatcacacatataatggttactaaatactgagttgtatttcagttacttgtgtgtattttcttcttacaactcctgcttctcagaatacataaaattttatccaatgcaaatgtatcatgaaaattttaacagtcctgtagcttatattcaaaataatgcagttatataatcaaatatacagacaaacctgaatttattatgaaaacacatttactttttctcagaaaatgagagcaaggcatataatcaactatacgtttaaaaaatcatacctttttatttacagcaaagccaattgaaacagctacaaaaggaaatctttttttaaaaaaaaggacaaaatacaaattaaccaacatagaacttttgttaataaaattaatcttttcataatataagtgttcttaaaatttttcctataaaaagtctcatctccactccccacaaaatctaagatgcaaaacagtttgtatggtatacaaccctttgtaaataggataaagtggaggtattatacacacacaccctccccccaacacacaggcacacgttcacacaggatgcttctataggcatgaaacatctctgaaaggattcacgagaaacttgtaacagtggtcatctccagagatggatcctgggaaaccagaaatggaagtgtgaagggcattttgcactgcgttttctatcttttgaaggtcaaattctatgaatatagtagctatgtaaaaatattttttcatggccacgcacagcggctcactcctcccagcactaatttagcaggccaaagcaggaagatcacttgggcccaggagttcgagaccagcctggctgggcaacatggcaagatcctgtttctacaaaaaaaaagtcacgaaattatctgagtgtggcggtgcacgcctatagtccaagcttccccggtaggctgaggcagaaggatcccttgagcccagaaggtcaaggctgcagtgagccatagtcatgccactgcatgccagcctgggtgacagagatgctgtccccctttaaaaaaaaagccaaaatgtaaaaacttttaaatcaatttggttaaaaaagaaaactgtaaaaacttttaaatcgatttggttaaaaagcatatattttagtgattttttttttttttggagacgaagttaagctcttgttgcccaggctggagtgcaatggcacgatctcagcccactgcaacctccacttcccgggttcaagtgattctcctgcctcagcctcccaagtagctgggattacaagcatgtgccaccatacccggctaattttgtattttacgtagagacggggtttctccatgttggtcaggctagtctcgaactcccgacctcaggttatccacccaccttggcctcccaaagtgctgggattacaggcatgagccaccgcgcctggcctgtgatgtttttttcctatgtcctacaccgtgataaacacaaatactgcactggacaaaataaatggctgttacttgtctctactccaacagcaaactttaggcttggcctctgaaaagtagactttgagccaaaatttttccatagctgcatgacagtctgaacacaggttgtaactgctgactcacaagagaattaagatcaaggaaatagacaagatcaacattcaactattgaagctaaagctgttgaaaataaaaacttttaaatatgtaagaaagtttttattttaacaaaaataagatactatacacactgtattgtactgtcttctcttctgtgaaaatatattagcatctttccacatttaaaagatataacattctatcacatatagattctaaaccttagctttgtagatttcaaggattgtatatatagtacagatgtgtacaactacatgggaacttcaaatatgacatctatatgtaatcccaccagaagcggctactgattttaactctcatgggcaattccaccaggctttcttctagtaatatcatatacctactctgtgtcggcactatactaagttcttacattaatgtactactcatagagttgagttacaattctacgaggcaagtgctattaatacggcctttttataaatgttttttaacattgtggcctagaaaagttaactaacttgcctaaggtgaaaaagccgtaaaaaaataccagaatgcacgtctattcatcctaacacccatgcaatttttttttttttgccggccccagccccagccccatccccatccccgtcaccctaagggctgaggagaggggcctcctctgcactttttaaccgtgttttttctcctggactgaactcattctatatcgacagcactccccaagagtgacttcattagttttactaaaatacaatctttttaacatagtcagtttataattttttaaatttatttttattctttgaaaacatatctttggccaggtgcagtggttcacgcctgtaatcccagcactttgggaggctgaggcaggaggatcacctgaggtcaggagttcaagaccagcctggccaacatggtgaaaccccgcctctactaaaaatacaaaaattagtcgggtgtggtggcaggtgcctgtaatcccacctacttggcaggctgaggcagaagaatcgcttgaacccgggaggtgggggttgcagtgagccaagactgcgccattgcatctcagcctggccaacaagagggaaactccatcttaaaaaaaaaaaaccatatttttacatagttactactaatagatgcatattagtagatccatatagatctatggtacatgccactcaaagaatagaaaatggcatgcagtgcaaagtgcccttcccactctcaaagcagcaatgttgtttgcttccctttttagatagtgccaacagtgggaaaaagaatggtgaacggggcacttggcaccacaggacaagatcacattagtatttctttacctcctccatatctgataagtctgcataatacattttgctccacttttacattttatatatactttattagaataaagaagcataaacgaagtatacaattttctaaagtgtacatgttcctaaatagagtatctataggtcaatccagttaatatgcaaagagtaattatattagacattttaaaacatacctatgtacaaagttagttgttccatcaatagggtcaatgatccatgtggggttgtcggttaagatacttttttccccagctgccacagattcttcaccaatgaaactaaaagccaagtaggacaaactcttaatctttacactgatttcaacaatttccaaatcataacatttccttagctacacagagtactataaaacatagcaggcgaggtgtggaggttcacgcctgtaatcccagcactttgggaggccagggagggcggatcacctgagtcaggagttcaagaccagcctggccaatgtggtgaaaccccatctctattaaaaatacaaaaattagccgggcatggtggcaggcgcctgtaatcccagcaacttggaaggctgaggcaggagaatggctttagcctggtaggcggaggttgcagtgagccgagatcgtgccactgcactccagcctgggtaactgagagagactctgtctcaggaaaaaaaaaaaaaaaatagcaaaagtctgtaccctacacttttctattgttgcttcttcttccttcaggtaaagactgataaatgtaaggaagctttaatttatttccccatgaataaagcgatgtgaaaaatttcaaaattcaaattataagatgttatactagggtaaggtgtgtgcacacacacatttgcggcagataagaaatcattaaggaaatgtaatgattttaaaaataggggccaggtgtggtggctcaggtctgtaatcctaacactttgggaggctgaggcgggcggaccatgaggtcaggagttcaacaccagcctgaccaacatggtgaaaccccgtctctattaaaaatacaaaaataagccaggcgtggtggcatgcacctgtaatcccagctactcaggaggctgaggcaggagaatcacttgaacctgggaggtggaggttgcagtgaggtgagatcatgccactgcactccagcctgcctgacagagcgtgtctccgtctaaaaaaaaaaaaaaaaaggtcactctctaatactctccgtccttcaagaggtggagcctaatattccttccttgagcgtgagctatgcagatacttgtttctaaccaataaagcgtaagtgacagtatacaaaactttggagactagttcacaaaatgcccctctaatttgcatctggttcactctgtttctcccttcctgtgccacctgctctggactaggagatgtcagcttccatgtcgtgagctactctgtgaagaggctacatggtaaggaactgagagaagctaccagcagacaactcccccaggaactgacatctgccaacaatcacgtgagtgaatggatccttcagttccagtccaaccttcagttgactgcagccttgaccaacactttgactgtaacttcatggaagaccttggcaagaaccgtgtagtcaagctactctcatatgcagaaccccaagaaatggtgagataataaacatttcttgtacacagtaaataaaaatacctgtgagatggatacttttcctttatggaagagataagcattttttcaactttttggtccgtagcagttaccaaatcaactggagaacttttcagcataacattcatttcattttttatagcttcacaaactacctaaaaagaggttttggtaagcaaatagaaaaggcataattttaaacaaaaagataaaatacataaatggtttaagacattcaatctgtcttaaataatattctttaaagacattcttaaaaatgtcttacaaatatatctataaaataagcctttaatagttacgtctttctaaaaacaaaaattatataatcttacatcttattttagattcacaactgtcatcacagaaaattttatcatataaaattagggtatacacgcaagagtatttagtaaaatgaaaataaatgtagattgatcaaagtgtatattttatttaacaaggcaggctgggtatggtggttcacgcacgtaatcccagcactttgggaggccaaggtggtccaggaattcaagaccagcctggacaacacagcgagaccctcatctccacacaaaaatttaaaaaatgaaaagtagctggacatggtggctcatgcctgctgtagtcccagctactcaggaggctgaagtgggaggattacttgagcccagcctgggaagttgaggctggagtgagccatgttcctgccactacattccagcttgggtgacaagcaagaccgtttcaaaaaaagaaaccaaatcgaaacaaacaaaacaaggcaacaacacagtatacccaccaatcacattataattgattataattgacaaaatcttagctcatacctctccagcttgtcttgctagagttactgcataatccatgcattcctgccaaggatcagccatcttctgaaaatatttgacaaatatctgtacaaagtagttataactgtcttagaagtcttaattatagaatagttagttcacaaaaacgtcttaattagaaacagactgtcatttcaggattcaccccctgccctagagtttttcccaagatttatgcctatacccagtaaaaaacatttctcacctaaattacctaatttctatatcaaattattttcataaagactattctatgaaattgcttcccagtgtgtctgtaccatattacatttttttaaaaaaccaaaacattcgtttggagaatagataagaaacaacacaagaaatactttaaaagttaggataatattttggaggagaatacagtgaaaacgagaaagaacactgggaatactgaaataaaagaagcttgaagggaagcagcaaaaggtacttgaaaaaattatgtgtaaagatgaagaacttaaggttcagagatgagaaataatttgcccaaaattacagacaaatgacacagaacttgaattcaattctgattttaaagtccatttttctttctattataacattctgagaaaagaaaattccaggaccaaaaaaaataagaaaaaagcaaatttatttccctgagtttcacagagggaaaaaaaaacccaacatatatttgtgttctaaactgtccagttttccactgacttctgaagactaaaataactcaccactggcttgatcacactctgaagtctgtacctagcacagtaaagctttttaagctgtcagactaaaaactgtggcaccatttataaaacaaccctaattttgtctcctttccaatagaaaataatagacacagagttacatcttgaagactattcagaaactcctatcttggggcccacattataggaaagaggacaggagtggaaaggagggcaaaagacccacacgctaaatttcttcctgatgctttttcttcctgattaaagcattttttaaaattttgttttaaaggaagccactctatgagtcatataagcaactccttcaagctcttcaagaattgtttccaaacttttttttttcactcttactcccattctgctccactagtcttaacagaactagatgttctcaagctgtacctgctttcctgccagaaacagctcaagccactcacacccccgccttctaacagcactaatgtaactctacaaattcttcaggacccatttcaaaagctacttctagggattctccacccagaagtcactatgtccttcatccttcaatagatgtttactgaatacctattgtatgctatacactgcaccatggggaggaaaatcaggtcctgttcacactttctaggaggggactcaatatcaatcaaaaactaaagactacatgcaaaataacaactggaataatataagttaaggagaagaagtgcaatgagaagcatctaacaggggagctttcacctggacttaggcatcagatcaggtttccctgaagacaagattaaaccaagatgagaacaagtgaacaggcatgaactcaatcaactgcaggatgcctggtacatgaagactaactgaacagcctaagagtgacagctcagattaagggaaacaggagagataaagctggggaggtagtggggatcatcctctacaggggggccttagggataagacattgattgaaggggcttcaagaatcacttcattgtggctactcaacagaagggtagaaagtgggtgttggtagagggtcagcagatttacattcaggatgcagtagtgggaggatacctgatgattggctgaaacctgggagggaagttttgctggtagagaagttaagagagtcagagatacctgttttgagggaatctaacagattggctacagagtaccagggacaggaagagttcagatttcctctgaatctggatgtccagatttcccactctggcaactgtatggataaccgtcacagtctactgaaacagggagcaacaaaaaaagagtcaagtttgggatataggtaggagtttgagagatcaggagtttaattagcggaagatgagaggcctctgtaaaatcaaaagatgtcagttaggcagctgaatcatggatcctgagctcacaggagaggtatggcctccatgtagaaacatgtaagttacttgagtagacagcaactgaggtcctgagtctggataatcactggataggcatgattgacaactgtgtagaaatgtgatcccacaaaatcagtatgatccaaatggaacagactgactgtggaaacccagcaaggactgtccattcggattcatcttggcctctctgtccagcattcctttctcctgtatatggggcaagaccccttgtgaaatggaggtcttacgatctacagtcagacaaggtaggtcagagaatttcttcatggctagttctaagacagaaaggtgggccaagattcctgtcaagggctatgggagttatgagccaggaatggtggatgcaaactatatatatatatatatacacacacacacacatacacacatacacacacacacacacatacacacacatacacatatataatacagtaaatatactttatatactatatatttagatactatatatagtatatataccatacataagtatatttagatactatatatagtataccatacataagtatatttagatactatatatagtatatataccatacataagtatatttagatactatatatagtatatataccatacataagtatatttagatactatatatagtatatataccatacatatttagatactatatatagtatactatacataagtatatttagatactatatatagtatactacacacagtatctttagatactacagtatactacacataagtatctttagatactatgtgtagtatatatactacacataagtatctttagatactaatgtgtagtatatatactacacataagtatctttagatatatatatctagtatatatatactacacataagtatatatactacacataagtatatatactacacataagtatatttagatactatgtggagtataaatactacacataagtatatttagatactatgtggagtatatatactacacataagtatatttagatactatgtggagtatatatactacacataagtatatttagatactatgtggagtatatatactatacatagtatctatgtgtagtatatatactatacataagtatatttagatactatgtatagtatatatactatacataagtatatttagatactatgtatagtatatatactatacataagtatatttagatactatgtatagtatatatactatacataagtatatttagatactatatatactatacgtaagtatatttagatactatatatagtatatatactatacataagtatatttagatatatatactataaataagtatatttagatactatatatagtatacattaagtatatttagatactatatatagtatatatactatacataagtatatttagatactatatatactatacataagtatatttagatactatatatactatacataagtatatttagatactatatatactatacataagtatagatactatatatagtatatatagtatatatactatacatagtatatttatgtactatacatatagtatatttatatactatatgtaagtatatatgtaagtatatttatgtactatatataagtatatatacctaagtatatttaggtactatatataagtatgtatacctaagtatatttctgtactatatataagtatatatacctaagtatatttctgtactatatataagtatatatacgtaagtatatttctgtactatatataagtatatatacgtaagtatatttatgtactatatataagtatacagaagtatatttatgtactatatataagtatatatactatacataagtatatttatgtactatatataaagtatataagtacattttatatatatttttatatatagttatatataatatatgaatagttatatatatataaatcacagtacatttattgatgggcagggtccgtagtttactcactttcattttcccaaagccataaacacctgaactgtttcctgctgtttctgtcctggtcacagccttccagcgtaggagccaggccaccttcctttttgccacctgtcccagcaccgcgactgcgggcagcacaggacctgggcgctgccccatcacttagagtgactacctgggcctggggatgcaccaagtttctaggagcttttcggagttggggacataaaaaggggcaattattccacagaagccgccacagaggttaagtgaggtcgcgtgagcgaaccgctactccaatgccggaactgttcccggtcgcccagggcagctccggataacgcagcaggcaggggtcacccagaggctgcctccaccctaggcgccgaccgcgcacggcgctcgcgcccgctcctgaggagggaaggggcctccctggaaacccacagcgcccgctgaacccggagggtgcggtgaggaaaataacggtctcaccttgagtcggaggacgtccggctagctctgtgaacggtgttaccgcactcgtctcttccggaggtagaggggctactcgcaacaggaagttccgcccttaaaaactccattcctgagggggcgtggttgctttgctgggccccgccccgagctgcgccctgcgagcctctgccaggccgggccgggtcctgacccgcgctggagcatgggatactgcctcttcattctagcttctggttcttttctcctgcttgtcttttcatctctcagtttttaaacattacttctctctttactttgcctttttcttctttcgtcctccattcattcacggtttcccatttagcttgctttcttctttctcccatttattctatagtactattttgacaaaacccagattgcagatatgattccgattatgcagcttttaggtgctaacctaaagctggtaaacctatactagattaaaaaaaaataaactgataaccagaaccaactgcccaattcttgataatttacttacatactatttattgaggacttactatgcttcaagcaattgtgtggggttttattgttttgtttttttgagacggaatttcacttttgtcgcccgggctgaagtgcaatggcgcgatctcggctcactgcaacgtccgcctcttggattcaagcgattctcatgcctcagcctcctgagtagctgggattacagacgcctgccacaacgcccggctaatttttgtatcttgtagagacggggtttcaccatgttgctcaggctggtctcaaactcctggactcaagtgatccgcctacctcggcctcccaaagattacaggcatgagccaccacgcctggccgaaatgtgtttttatatgcattattttccttaaagttttaacagtttcttgaaaaaggtatgattagctttgtcagacagatgaggaaactgaggctcagagtagttaagtgatttgtcctcaggtcacacagcaagagcagagagtgaaacacactgagttcaaagttttggggttcagaaaatgataccccacaatgaaggcctcagaagcagccttagaaggaaaaattttcctctgactccttttggtctcctgtctctggtcccacattcttccccagactagtcatagaagctagaattcctctttcccaaatcaggtcccagaaatcaggaccccttttttataaagccagccataaaacataaaaatactactctaggccaggcaaggtggctcacgcctgtaatcccaccactttgggaggccaaggcaggcggatcacgaggtcaggagatcgagaccgtcctggctaacacggtgaagccccgtttctattaaaaacacaaaaaaattagccgggtgtggtggctggcacctgcagtcccagctactcgggaggctgaggcaggagaatggcatgaacctgggaggtggagcttccagtgagtggagatcgcgccactgcactccagcctgggcgacagagggagcctccgtctcaaaaaaaaaatatatatatatagagagagagatatagatagatagatagatagatagatagatagatagatagatagatagatagatattactctagcattctccctgtgtttctatgtaaaatctgaccacgaagaaattatatgactcaccctgtctgagtttaggtcataagacccccattccaaagagggtcctatggagagaggccaagaagaatctaagcagacaggtcttactggatttccccagtctaatagcattaggttataccctctttgtccaaccatattctacacagctgtccatatgctgttgaaactaagcataaaatggactgtccccttatacctttgggtcttcattctgaaggctcccaagtcacataaaactatgatcaaataaaatccttttcttctatttatctgccttttgtcagttgattttcaccaaaccttcagaggacaaaagggaagttttttctttggccctacaaaagtttacacactgagaatatatggcacaatgagatcacattatatgaggtacaaggactagttatggtcttaaaatgtttcttcttcttgaaagagttggccaggtgcagtggctcatgcctgtaatcccatcactttgggaggccaaggcaggcagatcacctgaggtcagaagttcaagaccagcctggtcaacatggtgaaactctgtctctactaaaaatacaaaaattagccaggcatggtggtgggtgcctgtaatcccagctacgagggaggctgaggcaggagaatcgtttgaaccccggaggtggaggttgaagtgagccgagatagcgccattgcactccagcctgggtaacaaaagtgaaactccatctcaaaaaagaaagaaagaaagaaagaaagaaagagcgacatcgtggtacatacaccatcatagtgcaaaaagcattgcacagatataagatgtcctagctacaactggaccaggaaagtaagttagttatttggctctttgcttaggaagttactgtttctgtttgtttaatcaaaagacaaaatgtcaccaatatatttcaaatgaaatgtcttagagatgagtaatttggactggactcaattctcacacctcacaaggaccaataaacatctttaatccaaaaagagtgatgccttaggtatccggtttggatgtctatcaaatgatactttattttcttagaaaaaaaaaaaaggcttctgaggctagtttttcggttcttcattgccaatcttcttaaaataaaaatattgccaaccgcatgctgacaagtgctcattcgtaaccaactaatatttccaaagttttaacagaaaagtcatcggtcatctaagtttatgtaaatgaatgtggtttcagtgacttgaaaaaactgctaaaatcagcataaacaatttgaagtaaaataaactaaatatcaaatatcccttcaaatgaaaaccttacaagcttcctatgtcaggtgagcaggaagtccagtttttccaagaggcctcacctcaacagctacttcacattggttctcaggtaactcactcagtatttttcagtccaaagaggccgttctgcttccaaatgccttaccgaaagtgaagtgaaaatctgccggtgcacagggaagtcttagtgttcaggctcgattatagtggggctggaaactggtctcacaaatccaaaggatcttttctctgatgctgtgaaggtagttcacatggctgcagagacctcagtacaggatgcatggcccttgagttcccaaaggggcattttttaaaactacagtcccatctgcagccattgttcccaaacctaagaatatctgctgtgcccaggtggttgtcgggggcaggggacagcagcacaaactctgcttcctggcatgatgtccagctcctcactcttccaaccttccctaaggggagttccctcttggaggcctttggtatcctttcctgtcagctgactcccatctatgagagaggttgtaattacgctgaacctcagaatgaaagagaggtgagatccaatgcccctgacacctccccagacagctgagtgtacacaagagagttctagggaagggtggccctgtgaagccacaaagtggtctggtcatccttcccagtgggcaataggtgcttccttgttctgtatttgtacaataaagaggggccataggaattccttccccagaaattgtgggcatcttgccaactacacttagtctttggagatgacttctttttaaataaccactctcttcactaaaaaataattcaggttccacatgcgaagacgttcttggttataataattatttaagtggactttgatttaaatgatcaaatataaatacaccatggcagctgttcaggggtggagtgtccaaggatatctaataagatctcatgtttgatataacagattggagttgcatatattggttaagactttgacatacccttataaggccaacagctttccaagatataaaaatatatatcataaaattgttattcttggaagagtgtatcatagaatcatctcttaagagctggaaagaaacttttttaaaaattggcataaccattctatctctggatcgttattctatcttatagaatcgtggctgtggaaaatagttggtatgaactcaactgattagtcagtctgctttatgcctctcattcttatttttttaaaaaggaataacttgggtcaccccatccctatccatatttttggacaagttttactatgtaaaatctgtcctccttgatacatctattaaagaaataaaatatactccaaattccatccatgcccttgcaactgctttataagatcatttaaatatgcataatgtaacaaaaataataatagggcttaccatgtgtcaggcattcttatgaggaccttgctcatattaattcacttaatcctcacaataataccacgaggtaggtactaccattatcgccattttcagcatgaatttgggcatagagaaatcaagtaacttgaccaaaatgttccccagctggtaagatgatggagctagaagtgcagcccaagaggtcaggagttcaagaccagcctggccaacatggcgaaaccagatacaaaaatacaaaaatctctacccaaaatacaaaaattagctgggcattgtggcagtcacctgtaatcccagctactcaggaggctgaggcaggagaattgcttgaacctggaaggcagaagttgcagtgagtggagatcatgccactgtactccagcctgggtaacagagtgagcctccgtccccccgcccaaaaaaaaaaaagaaaaaaaaaaaaaacaagtcagccaggcacggtggctcaggcctgtaatcccagcactttgggaggccgaggtgggcggatcacctgaggttgggcgtttgagaccagcctgaccaacatggagaaaccccatctctactaaaaatacaaaattagccgggtatggtggcgcatgcctgttgtcccagctactcaggagactgaggcaggaatcgcttgaacctgggaggtggaggttgtggtgagccaagatcgcaccattgcactccagcctgggcaacaagagcaaaactctgtctcagaaaaacaaaacaaaacaaacaaacaaacaaaaaacccaaaacattatgtaagttaaatttgtacaaatgtaattctattttaaacctatagtggatatttcagtttaaaggagtaaaatattctacatacacaattatcactttataaaccaaataaacatctatcatgtctatttggtttatatcagattttatacaaattttggtagtcatatactggatttggtggcatttaaagaaaaaagaaccttggttatcttatcaactggcaaagtaaacaaaaattctctaattctatgatcaagatggtgaatagtactgatagaaaatgttgaaagttttaggctccatacatagttatacgattgctatttcaaactagcagcagatctaccagggttgaaagttaaaactgataaaacaatagcacttactatgtcccaggcactcttccaagcacattacatgtatactctcacttaattcctaggacaatctatggagttgacaccattagcttcatttgttaaatgagaaaactggactataagaagatcaaagaatttgccataaggctaggaaatagggaaagcaggattatttagagtgatatttcctattctcgatcccacactttcttgcacaagatcgtagacttgccctagataataaaaattttcactgaagattaaaaggaggtttttgaaaagcacactatttatttggacactagtctgtgcttcaacacattatttgaataagcacacagaagatactgtgttagatgtgatagggaatatcaaaatgaataaacatagttattatgctcaaagacttagagcaaaataggaaaattaaaacaggacacaaatagtcataaaacaagccaggttagctggaatgaacaatactcataacatactaagtcattctgtttgggtaaaagactatgtgtaacgaggtgagagaggagatataatgaaactgggaaactggctgggcgtggtggctcaagcctgtaatcctagcactctgggaggctgaggcacatgaatcacaaggtcaggagttcaagaccaacctggccaagatggtgaaaccccgtttctactaaaaacacaaaaattagctgggagtggtggcaggcgcctgtaatcccagctactggtgaggctgaggcaggagaatcacttgaacctgggaggcggaggttgcagtgagccgagatcacaccactgcactccagactgtgtgacaaagtgagactccttctcaaaaaaaaaaaaaaaataataataataaataaaactgggaagctaggttaaggtcagacagtagagtataataaatgcctcattaagaaatacaaattcatttaaaaagcaaaaagtcttcattgctgggaaattatatggtcaatgttagattttaggaaaattaatctgacagtgagtagagggtggagagacaggccagaagccaatttagaaaggtttagggaagaagcaatatagtgcagaaaaaagtgatagcactgagaattgagaagagcactggcaattgaattacaggctgtttctgtaggaaatacattcactataaagaaagaaagaaagaagacagaagagagatgaggttgaagagctgaccctgtgttgtggggtaaacagtaatgcctttggtgggttaacatggaagacaggagaaagcttagctctgagggcagagatgccacatttactttaaaacatacttattttgatgtgctaatgaaatttacaaattcattcaccgagtgagaatttgtcaaatgtctgctatctgggtgttccttcttttaatacttaggatatatcataatcactaaataagttttctattgctctgtctcatttaggagaccactgaaagtatcatattgacatcatagcctataaaacattctcaaaccaacacagttgcaaagttgtctccttcctctgaacttctgtattatcatctccaccactcattgagtacttagcatatacgaatgtgtgtgtgtgtgtgtgtgtgtgtgtgtatatatatatatgtattctctaccccccaatgtcagatttttaattacattataagtggcttaagagcaggtatcattatagttattcttttactctcccacagtgccctacccagagtaggaattcagtaatgctttaattgttagattaggaaatttcttttccttttatcttgtaagaaaaagatacatcttttcttagccttgtaaactagaatgatcagtaacatttcacatccagaacacatggctactgtaaaaggagccacagaagctaaattggccttggactgtggaaaagacagctgaataacggcaagagctaagaaactatttaacatcccactttcaatagcaacagttttacaaacaggaagaggcagcgtacaaactttagcaaaggagtacccaaacagcaaacccaaagcaggaactaagagacccaacagaatcacctctagattatctgtttttaagaacactaatcccactgtgaaagtcaaataaattcctacgaacattaaaataaaactcagaggtctaattattctctctaagaagcttgctttttcaggtattctatgcttgatgactattccaattgatactggcacaagtatgaaaaggagtgttgacacaattttagaaacaggaatatggaatgtacctgacaaccctaatatcctactgtatatataagaattgacaggcatcatgatcagagccaataatgttgatgtgcaagtcatcaaaatggccaatgtgaaatctccatctagaagcagagcaaagagatagcccccaccccctcctgggcacgtgcaggtcattacaactccaaaagcttgcgcctcaggcaatgccacaatctgagacaaaagaaacccgcaaaatggcatcagaaaaaactgtgtaactgccccaagaattactggcaaaggtctcttccatactgtttgaaacagctgtaattcaatcttacaaccaaatgcacacttattcaatagtattagtggtaaaataagcattaggatatttctatcaatatgcattggtgcctggagtagactgtctttttgtttgagcactttgactttcacattcttgatttcttcaatgagtctttcttgcctaccttcagaatcccagagttgaatagtcacatttgtttctccttcttcatcagtcaccagatttatggtaaagtttgtagcatctgatgagatcttcttggccacattcaccatttgtagtattttaggatcttctattttcacaaagaggtggctggaattaggccgtttattttcgtagcttgaacttacaaggatggtttcttcagtctttgtgaaaaatagtatttcagtcttctctatattcagaaaactgagcgatgacatccttgcttcttctatagtcacaagcaacaaaagtagaacaataaaaagttttctaatcattttgaaagctgaaataaatcatatatgcaaaatcgtttttaaaaaatgaaagaacattcttcatgcaggtgttccagtgacagtctgagggtgagttagataacagttgtttttgtaggatcaaagtccagtaggagggactgctgtacttttaaacaaatatatagccatctaagcagcaacacaaccggtttaacttgtgattaagacaattaaaaagtcatggcatttaacagattcgatttatcacaacagaaatctaatctcttcctcttgatttcctcatttctgcttatgcgaaaaaaaaaagcctcctatttacttgaatttaaagcttagtgtcatcattcgttagttatttcttgctaaaaaaaaaaaaattaaaagcagtcaggatcaagaaatctgtaacagacactgaggaaacctagagttcagtgttaccattttgttcaatcaagtcgaagtcaaatcaatattcactgaatgtctctttgcctagggcatggaattgggagctggccatcccataatgattaagccagatgcagtcgctgctctcctggagcttagtggggtgacccaatatcacaagttagaaaactgcagagcccagacactggccttggcagcatcccttggctgctaatagttttcctgcatctctgaaggatgatttaatctgtcaagcaaaaactgacactgttttttgtatacctaagtaggaaaaaaaattcctgaatggttaccagataacttggggacatagggaaagtaggtagctggtgccacggccaaaggtacaggctggttaagggaccacagctactggacacttggaccctgacacgatggggcaatggaaagacactggcattgattctaatcttttattccttgtttgtaacactactctctgttcacagttaggggcaagggcattcaattgacccaatttggtcatatcccttggttgccaggaatgagaaaaagcatcaggctttttggatttcaacccatagactcacacacttgtatatttcccacacaaggggtgggtgtcctgatgctaagcagcaaaccaaccagccgaccaaccaaccaaccaaacgtttactattaagcctacagatgtagtagtctctgaacacatgaccatttcagcagctctttcatgtaatcatgatgcaatgtgttcaaggtaatgccaatttgtattaagtattttagatcatttgttcctcaaaaatgtgaaacctttttgtcattttaacgagttttataaaagtataccatttatgtcggttaatctttcaaatgcagtagaccttaggtctcataaattttattaatatgtaccacattaagaaaaacaagatccgctgtaccaatggtgaggatagggaatgggactgttcattgatatttcagttaaaatttccctattttaactgacaaaaacaaaacaaaaaacaaaaatgtcataaaacctaagttatctttagttatgtgaccaaatatcttgactcataacttttgttgcctaggtcgaagatgtgagtatatcagtttttctttccccttaggactctttctgcaacccttttagttcttcggtttctccaggccctttcatttgaaaaccgtgaagaacaaagcctgacaaatctaggaaaactttgataatctatcattcatctatataagtgttcttctaaattttcatggaaaatatgtattataaaaaagtgtgtatgaatttcaattttttttttgcaccagaataaactttttgtaacatgtctgaacaggatctagtgagggacactaactatgataagacatttagaaaagagctcttttatcagagaaacataaattctgctaaaattgaaggaagaacacacatcaaatttatggtgaggtttgggtggaagaatggtgaaatcattgatgcttcacataaaggttatggagacaataccccaaggagatctgcagtttacaaatggataactcattttaagagatgagacaatgttgaagatgaagcccgtagcagcagaccattcacagcaatttgtgaagaaaaaaagcacagacaatatctaatatggtttggctgtgtgtccccacccaaatctcatgcagaagtgtaatgacaggaagtgttggaggagggacatggagggagatgattggatcatgtgcatggcttctgatggtttagcaccatcgccctagtgctgtcccatgatagagttctcacaagatctggttgtttgaaagtgtgtagcacctccctcttcacttgctgtctcctgctggccatgtgaagatgtgctttcttccccttctcccatgattttaagtttcctgagcctcccagccatgcttcctgtagagcctgtggaactgagtcaagcttcttttctttatacagtacgcactctcaggtaattcttttttgggaggacagagtttcactcttgtcacccagactggaatgcagtggtgctctctcggttcactgcaagctccgcctcccaggttcaagtgattctcctgcctcagccttgtgagtagcagggattacaggtgtttgtcatcatgcccagcaaatttttgtatttttagtagatatggggtttcaccatgttggccaggtttgtctcgaactcctgatctcaggtgatccacctgtcttggcctcccaaagtgctgggattacaggtgtgagccaccacgcccgacctcatgtagttctttatagcagtgtgagaatggactaatacaatatccaacatcatagatgtctcagttggttcagcttacacaatgctgacagaaaaattaaacttgagcaaactttccacttgatgggtaccgaaactattgcacccagatcagctacagacaagagtacttttgttctcctggtgggttttctacttaaaatttcagttgtctttcaataaaaattttaaacaagtgggatcaagatcctgaaggatttcttccaagaattgtaacaggagatgaaacatggctttaccagaataatcccgaaaacaaagcacaaacagagcaatagctaccaagaggtggaagtggtccagtcaaaataaaagtggactagtcaaaagcaaggtcatggcaactattttttgggatgctcaaagcatttttcttgttgactttctggagagccaaagaacaataacgtctgcttattataaaggtgttatgaggctgggtacagtggcttatgcctgtagtctcagcacttttggtggccaaggcaggaggatccattgaggccaggagttcaagaccagtctgggcaacatagcaagacctatctctacaaaaagaaaaaaaaaatatgagaatgtttagagacagccaaagttttagcagaaaaatgcccaggtaagctt

SEQ ID NO: 55 - DNA, 193789 bp, Homo sapiens
cactgttctccaaattttgtttgagggtgtttgtagcacagtttggaagctgaaatgaagggacaggaaggtttattaatgtatgtcattgagaacactaaagcctccttttctcctctctggattttctagcttttgaacttctcagatagaggaaccccagtgaagactgatcagttcttacaattctcaaagcatggcccatgtaagttggtgtttcttcttgaaatatggggatttttatattacgtggctattttccttaattgacctgaagcattcttcatcagaatgtaccatctaattgcctacttgattccttctgtttggcggaatgatgtcaaagtatcgtttcctccttacgaggtcctcatttctaatcggtgttcatgaattcattgagcaagttacgaagcaggtaaatagtaagtcttagctgaaaggctgtgatagagcagtggaggattgaagtcccgtggcagaagtatttgagcttcctacatccatctgtggtttgatgagtttgatctgttggcttcatctggccacacatcagaagatttgaagttttccacagagctgataagatggaattttgtattgattggtctcaatatgatgagataacatgctctatgaggcttttaagattgagtggggatgtgattatgatgtgaaacattgatatcatggttcttcttgggatgcctgagagtgatactaaggtcaattttgttatggaatgggacctgccagacttggacaacatgcatttggttctgagtcattttcaccctaatccactaactcaagaacagccaaatggccaggtgcagtggctcacacctgtaaacccaggaccttgggagccccaggtgggaggatcacttgagcccaggagttcaagaccagcctgggcagcatggcaagaccctgtctctaccaaaaaaaattttttttaattagccaggcatgggggcacatgcctgtagtcctaactacttgggaccctcagacagaaggacacttggagcccaggagttcaagattgcagtgagctatggtcatagcactgcactacagactgggcaacacagtgagactgtgtctcaaaaaaaaatttaaaaaaacagcagccaaagtattaagtgaaggatcttgtatgacactatcagcatattgttatcagtagtagatgaacagattaccagaactggggaaaactgaggcatttgttacagtcttcgtttataagtataaaatcattacttttttttttctttttttcttttttttttttttttgagactgagtctcgctctgtcacccaggctagagtacagtggcacaattttgactcactgcaacctccacctcctggattcaagtgattctgctgcctcagcttcccaagtagctgggattacaggcacatgccacaacgcccagctaatttttgtatttttagtagagatgagtttcaccgcataggccaggctggtctcgaactcctgacctcgtgtgatccacccacctcagcctcgcaaagttactaacctttaatacagatccacaagataacttttatgtcactttggaaaaaagtatttattaatataaggaaaaacacttatgatctgacataatgaacttgaagcttgaggagttattcaacaaatttgtgtcatggctattttctaagacagattttattctacagttggagaaaggaatcatagctattttcttcttaaagggaaagtaatatagagactaattgtttttgagaatttgtttcattggatacctagcaggccatatctttgtatgtactcttttacttaacagggaaactaggattcttttatccatttcaccacaaatctggagtattatgataatcctacaatatataggacattttgtccatagcagcaggattcttccagaacatgcagataccatgctcatccacttgccacatcataagcttccagcctatgtgattgttatgttattgctcccttactacactgaaacgttttattccctctcctttcaccttgaaagcattttctttgattttaccagaaatatgtgggtttgcagtatcacggatcagtgacatttgaggatgtggccatagccttctcccagcaggagtgggagagtctggactcttcccagaggggcttgtacagagatgtgatgttggagaactacaggaacttggtgtcaatgggtaagtgtacttctctcaaataattgagaatctgctccctgttatactttctcctttgcagattttagggctagcttaagaactgaacacgatttcttcttgttgccagagaaatgatttgagctttgttaggttggaaatgatccagtggcaggattagaattctggattgtctattgcaaaacattgacaaaagaggccaggttttctattatgtttttgctctaaattgctctaaatgctctgtgaaaatctgacccaccttgcaggcagaacagctagacaaagggtcttgatttgttctatctgaagacctatacaacttatatgccggcggattggataaacaaatcatttaaaactgaagttacctcattttatttcatataaaataatctgattttgtggttaaaattcatcatctctgaactttgcatttaagagtaaatgcaaattaaatctatatcctatagatatagatgtctaagcagactttgtttttgtcttagcaaaataacaataataatgttattaacacacagcgtgcttactgtgtgctgtttcactgttctctgctctttatattaatatacatttgtattaactgatttttaaccttacaagcactctataggtgctaaccattttaggtgagaatgctaaataaagcacagtgtgtttaagtgagttacgcaagatcacacagcccataggtgacggtagcagaaacttgaacccaggcacttaggttccacaatccgcgttctcaatcacaatgtcatactttctttttttttttttttttgagacatagtctcactctgttgcccaggctggagtgcagtgtaatgatctcagctcagcgcaacctccacctcccaggttcaagtgattctcctgcctcagcctccctagtagctgggattataagcgtacaccaccacacccagctaatttttgtatttttgatagaaacagggtttcaccatgttgaccaggctggtctcgaactcctgacctcaagtaatctgcccacctggcctccaaaagtgctgggattacaagcatgagccaccgggcctggttttttatcaagacacaaagaataaatgagtatacacttatctatatttataatagttagatagatagatagatttcatttaaaataaaacctttcggctgggtgtggtggttcatgcctgtaatcccagcactttgggaggccaaggtgggcggatcacgaggtcaagatatcgagaccatcctggccaacatggtgacatccgtctctactaaaaatacaaaaattagctgggcgtggtggcacatgcctatagtcccagctactcgggaggctgaggtgggagaattgcttgaacccgggaagcggaggttgcagtgagctgagatcgcacactgcactgcagcctggcgacagagtgagactctgtctctacataaataaaaccgttctctacctgtctggaattatgaatccccttgcccttctcgtgtctgagatataaaggtcaatatcgtttgacctttcatttatggcaaatttaaccaaagctggaagtatttttgaactcatattttatttcttttctacattcttatctcataagcaggacattcccgttctaaaccacatgtgatcgccttattggaacaatggaaagagcctgaagtgacagtgaggaaagatggaagaagatggtgcacaggtgagtaagagcatggcaggtagggaggccattgttgctggaaacagcccagctgtcagggaggaagtgcatctctgcaatgtttggaggtttcccttcaaagccctagggcctgggtggaaaaaggctgagacttgggtaagaaataaatatctcaccagcctcacaaaaggaacttcatctttacttattttaatactcactcacctcttgtttccctctcattttattacggacttaagtcactttcccagtgcattattccatctgtgtattgaatttcacttctttcacctcctcttttacatttggatttattcatatattcttagacagtaatagttgaacagagacaggaaaaatgagggttcaggccttgtaattatgtaagacatgccaagcagagggaatagcagatgtggatgctttgggtgggaatgagttttgtgtgcttcaggagcagtaagtaggctcaggcagaattaatgggaggagtaagaagaaaaaagctagagtgctagcaggaatttgaatttgtttgttttgttttgtttttgagtgagacagtcttcttttgtcacctaggctggcatacagtggtgcaatcatagctcactgcagcctcgaactcctgggctcaagccattttcctgcctcagcctcctgagtagctgggactacaggcacacaccaccacacctggctaatttttttaatcttcagtagagacagtgtctcactatgtggctcaggctggtcttgaactcctgggctcaagtgatcctcctgccttggcctcccaaagtactgagattacaggtatgagccatcgtgcctggccaggaatttggattattttctaatgtaactagaaactatgacctaatttacatttttccaatttttgaattttagaaaattctaataaataggaaacagataccagaaaaaccatattaaaatgtacagcttgatgagttattatgaggcagatacctttgtaaccatcactctggtcaaaagataaaacatttttacgggggctgggggacaacaagagggcgagcattaggacaaatacataatgaacacagggcttaaaacctagatgacggattgatgggtgcagcaaacaaccgtggcacatgtatacctatgtaacagacctgcacattctacacacatatcccagaacttaaagtaaaataaaaaatttaaaaaacaggccgggcgcggtggctcacgcctgtaatcccagtactttgggaggctgaggtgggtggatcaggaggtcaggagatcgagaccatcctggctaacatggtaaaaccccgtctctactaaaaaaatacaaaaaattggccaggcgtggtggcgggcgcctgtggtcccagctactcgggaggctgaggcaggagaatggcgtgaacccaggaggcggagcttgcagtgagccaagattgtgccactgcactccagcctgggcgacagagcgagactccgtctaaaaaaaaaaaaaatttttaaaaacaatttttataaaataacgtcaggcttacaaaaaagttggaaagttgtactaagaattttcatatacccttcaacccagattctccaaatgaagagagaaaactcttctaccttcccttaaggctttcatgccctgtacctaatcacagttacctttctccctccctgattaatcacctctagccacttcaaactttgccagggatcccatattctcactcccagtcttacctgctcttctcaagtcagcctgctatgcttatggacacctggttattttgaggttctcaggtctgtcagacaccccacattgtccccctctgccttttcctgcacagatgcctagaccacacaagtcttagctgtagtattttgtctttgtctcctagaattttgccattttgagggtacctcttcatgtagttttgttgtatatgttgtctatagtttttttttttttttttttttttttacagttttgctatcctgtttgctctgtttttatgggggtatttgtttaaattcaaaaacaatgctaccacttccaccattgtggtagtccattttcacgctgctgataaaacatacccaagactgggtaatttataaagaaaaagaggtttaatggactcacagttccatgtggctgaggaggcctcacaatcatggcggaaggtaaaaggcacgtcttacatggcagcagacaagagagaatgagggccaagtgacaggggtttccccttagaaagccaacagatctcatgagacttattcactaccgtgagaacagtatgggggaaaccgcccccatgattcaattatctcccaccaagtccctcccacaacacgtgggaattatgggagctacaattcaagatgagatttgggtggggacacagccaaaccctatcaaccatcatcctagtttatgtttttagataattactccaggtatttgtagtgggtagtctgaatgggggcaagagcagtgcaagctgggggtctgagtggttttgattaggatgttaatggtggacagcggtgagaaggcagagtgttcatcatacattttaatgtaaaacccacaacatgttggtggattgtaaatggatatggaggcaaagagggaaatcaagaaggatcaacaggtttggacttgagcagccgaatggtggtacggtcacgtgagatggtaaagaaggaagggcaagttgcagggcagatctaaaggtgtctgctttccatatgttaagttggagatgactcctgctcatccaagcaaagatgccaagtgggctgtggaatatgcaagtctggagctcagggagagtttaggcttacacatgagaacttgggatgcagctgtgcttggtggctcatgcctggaatcccaacactttgggaggccaagttgggaggatcacttgagcccaggaatttgagaccagcttgggcaacatagggatatcccatctctatataaaatgtacaaattagctatgcatggtggtacatacctgcagtcccagctacttgggagactgaggcaggaggatggcttgagcccaggaagtcaaggctgcagtgagctatgatcgcaccactgcactctagcctgggcaacagagaaaacccctgtctcaaaaaataaaataaaattgggattcattggcatttggctgctatttaaagccatggcactggctgaggtcccttgagagtcagtgcaggtagtgactatttttttgtctttgtttttgtttctgtttttgtttgagacggagtttcactcttgttgcccaggctggagtgcagtggtgcgatctcagctcactgcaacctctgcctccctggttaaagtgattctcctgcctcagcctcctgagtagctgggattataggcacctgccaccatgcctgactaattttttatatttttagtagagatggggtttcatcatgttggccaggtcggtttcgaactcctgaccttgggtgatccacctgcctcggcctcccaaaatgcagggattacaggcgtgagctactgcacccggccagtagtgactactcttaacatttagaggtcttctagaggaggctgcaaaagagactgcctcttttaaggtagaattaaaaccagaaagtggtgccaccaaagacaaatgaagaaagtgtttcaagatagaagagtaggccagacacagtggcttattcctataatcccaacactttgggaagacaaggcagggggaatcacttcaagccaggagttcgagaccagcctgggcaacatagcaggaccccccatctctacaaaaagtttaaaaattagccaggcatagagtcatgcccctgtagtcctagctactcatgaggctgatgcaggaaaactgcttgaacctaggagttcgaggctgcagtgagtctgcgctccagcctgggtgacagagcaagaccccatctcttaaaaataaaaaaaaaaaatagaagaatgatcacctgaaaagtgaactaagctaagcagtgatgagaattgaccacaatatatatatattttttcaagacggagtcccactctgtcacccaggctagagtgcagtggtgcaatctcggctcactgcatcctctgcctccaaaatacaaatgattctgcctcagcctcttgagtagctgggactacaggcgcctgccaccatgcctggctaatttttgtatttttagtagaggtggggtttcatcatgttgtccaggttggtctcaaacttctgacttcaggtgatccacccacctcggcctcccaaagtgctgggattacaggtgtgagccatggcgcccagtctgaccacaatatttagccttgctaaaggaggaaattttcaggggcacctaggggtgaaagcctgactggtctggtaaaaacagaatgggaggcaaggcagtgccaagaatgagcacagcagtcctcttgaggcatttggttctgaagagattttaaaaaataataataaaaaaataaaaataaggtcacattctgaagtatcgggtggacaggagtttgggggacactgttcaaaccaatacaccttgtatcctatcagtctccttatattactttgaggattttcttttttatttttttataatacctcttaatatctagaagtattataccattcttaaaagtctggatttgggaactttttttgcattttgccaactgagttaaaaactccataataatcttcacctagattcactagttcttaataatttaccactttgctctatatctatatatataaaaattttttgccgtaccatttaagttgtgcaattgcaagactttattcctaaatactccagaaggtactaagaattaaggatatgattcttgatagtcaaacacacgaaaacccatttcacctgcagtgcccaccggaggttcatcttaggctcaactgcgcattcagactaagactgcctgtggttgtcttggctctatctgtttggaaaatgccatagcaggaaccccagcttgccagcggggcagcctcacctgttttgtcaggctgcatccttacagtagttcacgcaggatacactcgcatagccctccaaaagtaaggtgcagagagacgagacacacaccaggtgagttggcgagctgccgtgacttaaagaagatacaagcatttcacagaactcagtacccttagcaattccacgggcatggtttccagggtccccacagaagacgtgccatttaaaagagattctacatttagggaagctcagagtatggagctgccatcaggtacttagagttccactcagtccacatgcaacttacctatcagtgtcttgtctcccctcccctcccctcccctcccctcccctccctcccctccctccgctcccctccctcccctatcctcttttctttcagatggagtcttgctctgtcgcctaggctggagtgcagtggcgcaatctcagctcgctgcaacctccgcctcccaggttcaagcaattctcctgccttagcctccggagtagctgggcttacaggcatgcaccaccacactggataattttgtatttttagtagagatggggtttcaccatgttggccaggctggtcttgaactcctgacttggtgatccacccgcttcggcctcccaaagtgctaggattacaggcgtgagccaccgtgcccggcctaacttctgtatctttagtagagatggggtttcaccatgttggccaggctggtctcaaattcctgacctcaattgatctaccctccttggcttcccaaagggctgggattacaggtgtaagccaccatgcccagcctaaaagctaatttttttaaaaaaagacatgcaggtgatgtgtccagacttttttcaagctttcaaaggtgtgcaggttttcgagcaacacagtaaggatacggaaggatgccacagcgttatttcactactgcatcatctttctaggcagtgccatcattcatccactttcctatttagtctttcttttttcacatgcttgggcataattgacaaataatgatgaaataacttaggatgatgagacggaaaaatgttcccaggaaatttattcttacacatgattcttactggaaaaaataagattactgtctcgtagtagattgtagttttataaaaaggtgtagtagagccctaattgtaaaattgaatgaaatttagtatattttgaaaataagtaagttttctctttgttcttttgaaggcctttaagaaagactaaatgtcatgaaatactaattcttacaaatagttagaattgcttgaaaaagaaactcaaaaactaaaaattgaccccatgggccctgatagaatactgaaggttaagacaggttcggggaggtatgctggtctcagttttctttaacacagagataggggatttcgttgatttctgttctcagtgtcccctgtctcctttttggtcatgcttcagccttatctgaagataggccgttatcttcttgggaccatgattatccaaatgtacacaactatgtcatttcaacctccaaaagttttttttctgttcttttatttcaaatatcatttggagctgggcacggtggcacacacctgtaatcccagcaccttgggaggtcgagacaggcagatcacctgaggtgaggagttcgacaccagcctggccaacatggtgaaaccctgtctttactaaaaatacaaaaattagctgggtatggtggtgcacatctgtaatcccagctactcaggaggctgaggcaggagaatcacttgaacccaagaggcagaggttgcagtgagctgtgatcgtaccacagcactcctgcctgggcaacagagtgagactccgtctcaaaaaaaaaaaaaaaaaaaaaaaaatagaatatcatatggattatttgacaagaaaatggttgcacaatagcatttatgactctaggcatttgaactctagagtatagacaaatcctaagagaatagttacgatcagaatttatagttcagttctaggccaggatcaaagacttgtacacaaatgcaaccacatgaacagatcccatccctaatccaaagagcccacagaaccagatatggaagaattatcccaattatctaatttcctgatttcttatgtctttcctaaatcattttagagtttttaaagatttcagaggtctttagagatgtgagtacaacattcttctcataagaataatatttcttgcttgaaaggcacggtactttttctaaacaatgtattttgaaccagttgcctatccagtttcatggacatgaatttgtgtctttgtgacattgtccagatctgttatcgggattacaatgctaatatggttctccccattttgagggtcctcttgtgtagcgtgacattaaaaggcttggaggtagaaggaaacagtccaaagttctgtttcagtggtgactgaagttttgttttgttttgttttgagatggagtctcactctgttgcccaggctggagtgcaatggcgcgatcttggcttactgcagcctctgcctcccaggttcaagtgattctcctgcctcagcctcccaagtagctgggattacaagtgcccgccaccatgcccagctaatttttgtatttttagtagagacagggttttgccatgttggccaggctggtcttgaactcctgacttcatgatctgcccactggtttcccaaagtgctgggattacaggcgtgagccactgcacccagcctgactgaagttttttgacacaaactcaggtccagtttctctcctctttgaattaagttatctaaaggtctctttttctgacaagggggatgaatgggccacagtgatcctaggagataacaggaaccatcctaaaggcaggtattgagttcagtgagttaacatatctaatccagttttgcagttggtttttgtgtacaaacccagtgctttagtggccaccccagtgatctcgtcctatgggcttatcaaataatatggcaatattttaaaaggtggtaaacagttttgtctcaatatatcaaaggaggcaatgtgtatcttatcagcagatatctaatgtctggccgtgctcctcattaaaagactgtttactagattacagtgataatggtccaaccccacattattgagtatgtttctccttgtgactaaacaataatctgtgtgatcttagtttattctcaagaagtacacgtttattcagtttagcagtatatcttgtcatggttttaacaacaaatgataattctcattggaattataaaatatcattctttgtatggagatattttattacgattatttcttttgtatagaaggccggactcattggctcacacctgtaatcccagcactttgggagggtgaagtgggaggacgacttgagcctaggaattggagaccagcctgggcaatgtggcaagaccccatctctataaaaattacaaaaaaattagctggacatggtggcacacacctgtagtcccagctatccaggaggctgcggtgggagggaatcacctgagcctgggaggttgaggctgcattgagctgtggttgtgccactgcactccagccggggcaagagtgagatcctatccaaaaaaaaaaagaaaagaaaaaaagaaaaagaaaaccagtaggaaaccaaagaatgaagtgctagaaagtaaagacatggacgtccttagacaaagttagcagtttaccatattcctgataaagtgacattttattttaaacatggataggataagaaagctccagtctacaaacaaaacatgccagaagatttttaggcgatgatgccacctgcacatggaaccaaaaggtgagaaaatttgtaagaacgtcaaggtgctaaaagggggaaattaggtcagtatgggacagagggagttgtgtcttgatatgaggtctgagaggtgagcagggacaatattatctgtggaaagatacatggattttaatgtaagcgccacaagaaacccctagaaggaacaataaaatatggattataaaaatttcatctgcatcagaaacatttgttagaaaggttgacagtattgatgtccaggaacttcccctatgtctgattcagaggggcgggatgctgcttgaacatccattttttaacaggctcttcaaagattattatccacacctaaatgaaaactgtttcactaatcaccaaccttactattttacataaacacttgttaatctctgcattcctttttttttttttgaatttcataatggtgttttaatattactgagctatttatttctagttggtgttattttcagtttttctcttttcttccctagaattttttttcaaatagaaaaataagatatttttaaaattttctttcagatttgcagttggaagatgatacaatcggctgtaaagaaatgcccacctctgaaaactgtccatcttttgctctacatcagaaaataagtagacagaaaccacgtgaatgtcaggaatatggaaagaccctttgtcaagactcaaagcctgttcaacatgaaagaatacatagtagtgaaaaacccaacagatgtaaagaatgtgggaagaactttagtaatggacatcaactcaccatacatcagagattgcatgttggtgagaaaccctataaatatgaaaaatgtgggaaggcctttatcagtggctcagcctttgttaagcatgggagaattcacactggtgagaagccactcaaatgtaagcaatgtggaaagactattagtggtagctatcaacttacagtacataagagtattcatactgggaagaaaccatatgagtgcggggaatgtgggaaagcttttctagtatatggaaagcttacccggcatcagagtactcacactggtgaaaaaccctttgggtgtgaggagtgtgggaaggccttcagtaccttttcatacctggttcaacatcagcgaattcataccagtgaaaaaccttacgaatgcaaagaatgtgggaaggcctttagcactagctcaccccttgctaagcatcagagaattcatactggcgagaaaccctatgaatgtaaggagtgtgggaagtccttcactgtgtatggacagcttactcgacatcagagtattcatactggtgagaaaccttttgaatgtaaggaatgtggaaaggcctttagacttagttccttccttcatgcacatcagcgaattcatgcagagataaagccctacggatgcaaggaatgcgggagaaccttcagtcgtgcctcatatcttgttcaacatggaagacttcacactggcgagaagccctatgaatgtaaggagtgtggcaaggcctttagtactggctcataccttgttcagcatcagaggatccatactggggagaaaccctatgaatgtaaggaatgtggcaaagcctttattagtcgccatcagcttaccgtacatcaaagggttcatactggagagaaaccctatgagtgtaaggaatgtggcaaggccttcagagtgcacgtacatctcacacagcatcggaaaattcatactgatgtaaagccctatgaatgtaaggaatgtggaaagacttttagtcgagcctcgtaccttgtacaacatagcagaatccatactggtaagaagccctatgagtgtaaggagtgtggcaaggccttcagttctggctcataccttgttcagcatcaaagaattcatactggggagaaaccctatgaatgtaacaaatgtgggaaagcctttactgtttatggacaacttattggacatcagagtgttcacactggtgagaaaccttttgaatgtaaggaatgcgggaaggcctttagacttaattcattccttactgaacatcagcgggtacacactggtgagaaaccctttaaatgcaaaaaatgtgggaagacctttagatacagttcagcccttaaagtgcatctgagaaaacatatgagtgttataccctaagagtctgaggagtgtgggaagtgcttcgtgtgtggctcaaacattgttgaacatcggggaatttatgctggtaggaaactttcaaatgtgaagaatattggcaggtctattctcatcttataattcataatataactcagaaaacataagaatattcctttgtcatttataggtttgtaataccaatatttatactggtggaccattcagaaaaagtgggaaacgttattacttaatggttacagcactgacagcatgaacttttatatgatgcatttattctaatgtgattgtatgaacaagtgaataaaaaaccttggacctcctaaaccactgctgaacttcaaataattcattattttttaaaaccagttaacaatgtaatgaaagcctttagccatggcactcacgttaactatcatcattgttattccactgccttgcagccagttagatattaggcactacacttatcaccttacagcattgttttaaaatggtgataatagaacctacattcttattaaaaaaaaaaaaaaaaagccaggcttggtggctgaagcctgtaatcccagcactttgggaggctgaggcaggcggatcacgaggtcaggagatcaagaccatcctggctaacacggtgaaacccccatctccactaaaaatacaaaaaaaaatagctgggtgtggtggcgggcacctgtagtcccagctactcaggaggctgagacaggagaaaggcataaacctgggaggtggagcttgcagtgagccaagatcatgccactgcacttcagcctggtgacagagctagactctgtctcaaagaaaaagagaaaaattgagacctcaattaaactgggcatctgagctgggcacagttcaaatgggaggtcgggaggctgaggtgggaggttcacttgagcccaggagctcgagatcagcctgggcaatgtaaagagactctgtctccacaaaaaaataacaagtaaaatagaataaattggctatctggcacctatcagggacatgagagttccattggatagctttaccgagaacccagaattgtgtattctgggaagggaaatgtatgcctttgttattatcagtaatatctaacactgaaggaaataaggagttatttggccttgtattgtggccatagtatatctagagacatgtgtgatttacgtttatattttaggtatctgtaaggtaggagattgctagagtttttactctgaagtgcacaactcttaggcaatggcccaatagtttgcaataaatgtgaagatgaggccatttgttgaccaggtcatccagtgctaagatgactgcctgaagtttggccaattgtgttgactgctggggacatcctgtctaagatgcaaagtagcaagattccactaatttaaaaaacaacacacaaaaaatcaatatttatgatggttggcagtgtcgttcatacagtctgcaaactgctattgctgtttacttagttaatcccaagggtctccccaggtagccaaccagtctaggagagggggtgacttcttccagtaccatggcatgtggcaagagactgaggacaaaggagaccacctctcctgtagatggaatacgccagagggcccagatttggctctatcctgtattaaggaggcctcggtagccatgccaagtttgtaggttgctgtttcttgactcaaaacaaatgggcagctaagtattaggtctgtgaaagtctctatttctagaagagcctagtatgtagctagtcagtttgttttaatggaggcatagcatgattttgagaagggcagtttcttgtatcagaagcccttgggaaacttctggccatcagaggtggtctagagactcaaggacacatgagaagaggttgccaaagccttgacagtgaagggatctcttagggcgctaacaaatgtgtctgtcgatgtcaatgtggacacattttaaagactgctggggggaatcaccctgtctgatgttatgggttattatatagctaaggatacaagacactgtggtactggggagggataaacaacataggtctaaagaacagaatagataacccagaaacgtgcaaagaaatataaccaactgatttttgaaaaacaagtaaaagcaaataaatgaaggcagataaggcttttcagcaaataatgctggagcaattgaacgtccatagacaaaagatgtgaacatcaacttaatcccatactttaaacacaaattcactcaaaatggatcacagactaaaatataaaatataaaagtacaaaatgttcagaagaaaatacaggagaaaattgtcagaactgaaggctaggtttaccctaggtaaacccattaaacaaaagaaaaaatatccaaaaataagagtatcagtttccacattaaaaaactaacgaagagaaatgcaaaatgagcagaagagagtatataataaagattaaaatggaagtcaatgaaataaacagaatgaactgtgaagaaaatcagtgaaaccaaaagccttaagaacaatacaactgataaacctctagccaaggattatcaagttacaaagaagcacataaattacccagattgggaatgagagacatgacagattctacagatattgaaaggaaaatcatgaacccatttatgccaataaatctgggaaataaaataaaatgaacaaactctctttgaagacacaaaccactaaagttcacttaagaaaaataaaaatgtatatccctatatttatttttaaaatcagatttgtaattagaaaccttcctacaaagcaaactgtggcttaaatggcttcagtggtatattctaccaaacatttagggaagaaaacctaagaatgcagaaactcttccaaaaaagtggaagcataaggaatgctttccaacttaattggtgaagctattatagtgataccaaaaccacacaaaggcattacaagaaaaccgcagatcaatatccttcatgaacataggtatagaaacttcaacaaaattttggcaaatcaaacccaacaatacaaaaaaaggataacacatcaagaaaatgtagatttaccctcaaaatataaaagttcacttgatatttgaaaatcaatgcaatttaccattaaaagactttaaggccaggtgccccagtggctcacgcctgtaatcccagcactttgggaggctgaggcaagcggatcacttgaggtcgggagtttgagaccagcctgactaacatggagaaaccccatctctactaaaaatacaaaattagccaggcgtggtggcggatgcctgtaatcccagctactcaggaggctgaggcaggagaatcacttgaacctgggaggcggaggttgcggtgagccaagaccgtgccgttgcactccagcctgggcaacaagactgaaactctgtctcaaaaaaaaaaaaaaaaaaaaaaaaaaaaaaaaaaaaaagactttaaaacaaggtaaaacgtgattgtagcaggtaaactctaaaaagaaccccaaatctctacttcctggaattcttacccttgggtacccctcacacattttacaagggttgatctgtaaagcccgtataaaacagaaaacatgagaacatgtaacttccaattttaggttattgaagacactggtctccttcttgggtagactctcctgctcttggatcactttctctgtttgaaagaatccctgtgacgagcatccctatggagagatccatgtggcaaggaactaaagcttcctgtcaactgccatggaaaagagattagaattgaatcttccagcctccagcaagtttcctgagactgtagctccagagacagcttaactgcaatttcatgggggattctcaaccttgacctacctaagctgcttccagattaatgtaatattctaaaatatgtaaacaaatgtagagtgacagaaagcagatcagtggtttcctaaagacgggtaggtggataaggaggaagagattacaaagagcccaagaaaacctttaatttcatggctataaacatgtaccaaaacttgtacctgtgaaatatgtgtagtttagacttcaataaagctgtttttctaaaaagaaaaaaaaatacttaaaaaaatcctcatttcctaattattttactattatctatgctttagaggttatttacgtttattgcatctattcagtggaaacagaatacaatggcgtgctattgcacatatcttcccaactccatattcagagacatcatgttgtagcttgaaattggccaagacagaagtatttacacctagggtattggtaaacactacaaaccagaacttgatctgttgttttattgaccaggtagacttaagaaagcagagaatatgttaataattcagattaaacttaaaagtgtttcatgtctctagtttcccattgtgaacagcacaaaattttgaggaaatattcttccaatattcaaaattaccctacaaaacaaataagtcactggcattattaataaatgactgcagttccaaaaaatttctttactatttcaatatcaactaatatttacttttaaaataggcaagagatatcagtagacattttaccatagaagttatatgggtggcaaataaaaacatgatttaaaatatgctcaaaatcatgaagccttagagaaatgcaagttaaaactacaataagatactattactccatccctagtagcattataaacattaaaaacacagatcatagcaattgttggtgattatgtgacgaaactggaactcttgctcacaatcagggaggcaggggatgtaaaatggtataataactttagaacacaatttggcagtttcttaaaatgtaaaatattcacctaccctgcaacaaaggcattgcacttttagataataacacaagagaagagaaagaatattcccacacaaagacctacacactaatgattacagtagctcaatttgtaacagacaaaaaccaacatgcagctaatagaagaaaaggtgggagttccagaggaaagagagaaacaaggaggaagagggactatttttaagaaatggccaaaactacccaaatttgatgaaagactttttttttattttaacacactatacagatgtaaaaagacataaatataaacacccaagaagctcaatgagctccaagaaggatgaattcaaagagactcacgctgaggcacattataatcaaactgtcaaaagacagagacataaagagaatactgaaagcagcaaaaaagaagtgactcattacattcaagggatactcactaagattatcagatttctcatcagaaaccttagagggcagaagacagaaggcagaaggcagtgggctgacatgttcaaagtgctaaaagaaaagaacggacaaccaagactcctaaatctggcaaaactatccaccaaaactgagggagaaatgaagacattcccaattgagggaatgcgttaccaagagaactgctgtgcaagaaatgctaaagggagtccttccagttgaaatgaaaggacactggacagtaactcagtgccatgagaagaaataaggatctctagtaaaggcaaatacctgggaaaattttaaagttcatattattgtaactttggtttgtactccactttttgttttttatgtgatttaagagacgaatgtgttaaaaaattattaatctatgtttttggacacacaatgtataaagaggtaattttgtgacattactatctacaagtgttggggatggagttgtataagatcagagtttttctgtgttattaacggtaagctggtaaaagttcaaatcagagtattacaaatctaggatgtgaaatgtaatctccatggtaaccacaaagaaaatagttatggaatatacacaaaatgaaacaagaatgaaattaaaatgtttcacatttgaaaaatcaaacacacaaaaagagagtaatataggaaataagggacaaaaaagctaaaatcacatagaaaataaatagcagaatgacagaagtaagtccctccttatcagtaattactttaaatataactggattaaatcctcagagcaaaacacagaaactggcaaaatgagttaaaaaacaaacaacaacaacaaaaaaaacaccgataatccaactatatgctgtctacaaagtttcactttagatccaaagacagaaatagattgaaagtaaaagaatggaaaaagatattccatgcaaatagtaaccaaaagaaagcagggatggacatactggtatcaaacaaaatagaccttaaatcaaaatgtggttccatgagacaaagagagacgttacatattaagaaaagattcaagacagcaaggacatataacaattataagcatttatatacctaataacagaccatcagaatatatgaaggaaaaatacacagaattaacagaagaaatagacagttctacaacaatagttagagacttcaataacccattctcaataataaataaaacaatcagaagaccaataaggaaatagagcacttgaacaatacaataagccaattagatctaacagaaaatatatagaatacacgataacaatagaatacacttgcacatgggatattctccaaaatagaccatgtcaggccataaattaagggtcaatagattttaaaagatatatatcatataaaatatcttccctgatcacaagaggttaggaaaacttgaaaattcacaaatttgcagagagcaaatgacactcttaaataatcattatatcaaagaaatcacaaaggaaattataaaatagagatgaaagaaaaggaaaacaatatacaaaaacttgtaggatacaacaaaagcagtgcctaagtaggaaatttatagctataaagattatattaaaacagaagaaagatctcaaatcaaaaatctaactttacaacttaaaaaaacttaagaaaaactttataacttaagaaacttaagaacaactggccaggcgcggtggctcatgcctgtaatcccagcactttggaaggccaaagcaggcagatcatgaggtcaggagttcgagaccagcctgaccaacttggtgaaaccctgtctctactaaagatacaaaaattagccaggtgtggtggtgcacacctgtaatcccagctactcaggaggctgaggcaggagaattgcttgaacctgggaggcagaggttgcagtgagctaagatcgtgccactgcactccagcctggcaacagagcaaggctctgtctcaaaaaaaaaacaaaacaaaaaaaaaacaaaacaaaaaacaaagaaaacactaagccaaaaatttagcaggaggaaggaaataataaagattagagcagagataactagagaatataaaagcaatagagaaaatcaacaaaatcaaaagttggttgttaggattaacaaaattgacgaaattttagttagaaatgacaaaaaaaagaagattcaaattaataaaattagaaattaaaatgaagacactatgatagagtctatataaataaaaaaaattacaagagagctatgaacaattgtatgccaacaaattggttgacctagaatggatatattctgtgagacacaaaatctaccaagactgaatcatgaaaaactaaaaggctgagtaccatggcttatgccagtgatcctagcactttgggagactgaggcaggagaatgcgtaagcctaagagtttgagactggcctgggcaacatagagagaccctgtctctataaaaataaaaatcagctggatatgatggtgcgtgcctgtagtcccagctactcaggaagctgaaatgggaggattgctgagcccagcaggttgaggctgcagtaagccatgatcatgccactgcactccagcctgggtgacaaagcgagactctttccctctctttctcactctctctcaatgatgaagaagaagagaaagaggaaggagaggaagaggaagaagaagaagaggaagaagaaaaagaaaagaaaaaagaaaaatttgaataggcctatcaacagtaaacatagagaatcaaaaacctctcaacatgaacaacacaaaagccctgacctgacagcttatctggtgaatactactatacacttaaagaactaacaccaatccttcttaaacttttccaaaaaactgaaggataaaacacttcctaactcattttatgaagcagaattgcccttatgccaaagccagccaaacataagagaactacaaaccaatatcccttatgaacactgatgccaaaatcctcaatcaaatattagcaagccaaattaagcagcatgttaaaaggattatacaccatgtccaagtgggatttattcctagaatgcaaggatggttcaatgcatgaaaaacaatcaatatactattccatattaacagaataaaggaaaaaaccaatcatctcttttgatgcagaaaaagcatttgacaaaaattcaataccatttcatgtaaaaaaaaactcaaaaaatgaaataaaaggaaactatgtcaatgtaataaaagccatatataaaaacccatagctaacatcattctcaatggtgaaaaaccaaaagctttctgatcaggaacaaggcaaagatgtcctctttctctgtttctgttcaacatggtactggaagtcctagccagagtaattatggaagaaaagaagtaaaaggcagccaaattggaaaggaagaagtgaaattatttctgatcccaggtgatattatatgtagataattctaaagttttcacacacacacacacacaaagacttaaaattaataaatgaattcagcaaactagcaggataaaaaaaatcaacacagaaaaatgacttacatttccatacactaacaatgaacaatctgaaaaggaaatcatgaaaacagttccatttacattagcatcaaaagtaatagaatgcttaggaattaaccaaggaggtgaaaacttgtacaatgaaaactacaaaacactcctgaaagaaagcaaagacataaataatggaatgaaattccatattcacagattgggtaacttaatattattaagatgtcaataccacccaaagtgatcaatagatttaatggaatcccaataatatcttgtgcagaaatataaagatccattctaaaattaatatggaatctcaagggatcctgaacagccaaaagaatattgaaaaagaacaaagttgaaggtctcacacttcctaattttaaaacttactacaaagctacagtaattaaaacagcatgaaactggtgtaaggacagacatacacaccaacagaattaaaatggagctcagaagtaaaccctcacatatatgctcaaatgatttttgacaggagtgccaagaccaaccaatggggaaaagacagtcttttgaacaaatggtgttaggaaaatgggatatccacatgcaaaacagtgaagctggacccttacctaacaccatacacaaaaatgaactccaaaaagtgactcaaaatgaatcaaagacctagatgtaagagctaaaactataaaaactcttagagacataggtggcaatggttccttatatatgacaccaaaggcaaagacaccaaaagaaaacatagacaaattgaacctcatgaaaatttaaaattttctgatcaacggacactatgaacagagtaaaacggtccacagaatgggagaaaatatctgataaaggattagtacccagaatatacagaaaagttgtaaaactcaacaacaaaacaacccaattcaaaaatggaaataagaagccgggcgcagtggctcatgcctgtaatcccagcattttgggaggcggaggcgggcagatcacgaggtcaggagatcgagaccatcctggctaacatggtgaaaccccatctctactaaaaatacaaaaaattagctgggcgtggtggcaggtgcctgtagtcccagctactcgggaggctgaggcaggaggatggcgtgaacccgggaggcagagcttgcagtgagccgatcgcgccactgcactccagcctgggcgacagagcgagactccatctcagaaaaaaaaaaaaaaaatggagataaggaggggtgagtgaaaaaaaaatggagaaaatacttgaatagaaatttccccaaagatatacaaatggccagtaagcacatgaaatgatacttaaagtcacaaatcattagggaaagcatatcaaataagatactacttcacacccattagaatggctaccaccaaaaaaaacaaaaacaagtgctggtgaggatgtaggaaaacaaattttttttttttttttttgagagggagtctcactctgctgcccaggctggagtgcagtggcgtgatctcggctcactgcaagctccgcctcctgggttcacaccattctcctgcctcagcctcccaagtagctgggactacaggcgcctgccaccacgcccagctaattttttgtatttttagtagagatggggtttcaccgtgttagccaggatggtctcgatctcctgacctcgtgatccacctgcctcagcctcccaaagtgctgggattacaggcatgagccaccacacccggctctgaaaaattttaaactttgtttattgttggtaagaatgtgaaagggtgcagttctgtggaaaacagtgtatgtcaggtcctcaaaaaactaaaaatagatttactatatcatctagtaattctacttctgagcatatacccaaaagagttgaaagtagggtcttgaatagatatttgttgtgcactcaggttcagagcagcattattcgaaataggcaaaaggtggaggcaccccaagtatccattgacacatgatagagaagcaaaatgcagcacatacaaggaaatactaatcagccctaaaaaggaaattctgacatatgctccaacattgatgaaccttgagaatattatgctaagtgtgaaataagctagctacaaaaagacaaatacttattattctacttatatgaggtacctagagtggtcaaattcatacagacaggaagtagaatggtggttttgaggggctggggaagggaaaatgggaagttattgcttgacaggtacagaatttcagttttgcaagattgaagagttctggagacgaatggtggtgatggttacataacaatacgaatctacttaataccattgaagtatacactaaaaatggttaggatagtaaatttcatgttaagtatatttcatcagatttttttaacatttttaaataaaccataaaaaactatggtgcactcacccagtatagcactactcagtagtaaaaggaatgaactatatatacacacagcatggatgattctcaagataattatgctgcatgaaagaaaccagaccaaaagagagtataaatactttatgattccaattgtgttaattctagaaaaggcaaacaaatctaaagtaaaaaatgtaaatcaacggtttcctagggaaggcaaggagggaatgtaaaggggcatgaggtagctttgcaggtgatggatacgttcattatcatgattatggtattggttccctgagtgtacataatatatgtacaaaacttaccaaatatgaataattattgcatgacaatcacatatcaacaaagcattaaaagaaactgttgcacataaaaatccaacttcctactcattttagaaaatccgatttggcaaccctatattgactctgtcatctctttcttcttgccttgggagcaaagaatggctggctacgtcatagatactacagtccctatagtataggatctgctttttctcagtccctattttcctgccagcacagcactggccttcagatgcacagcacggagatggtaatccacaaaaccaaaacctttagattatttgctctgccagtaacattagtcataggacagaggtctgaggtcctgagaatttctgcaaaccctgaatcctgcacagccacattcaagggagcattcacggatgcacatttagcagagttccatttctgctggtttgctataatctcgcctactccctattaatcacatccagtgtttctgtacaaattatggtcccagctgggcctggtatgtcttacagttaagagatacctgcctaatgctgaacttcagggcatatggctccttggcaggtgctaaacagcatctgctttacagtattggggaatatggggcaccccctgggaataagggacccaattcatgctgttcccacatgcactggaggttgtcacaactgccccctcctcgggataaaaattcacgccattcagaccacaatattatacccataaattcctacaatttttcctaggaggccttggtggcaatgcaaatgaggtcaaatctggattgacagttgtttctctgccatcctcctgtcccctccaagataatctggagaccccttcagtttggtagatcttaactctgctcttgaaccaccccacacagtgatcagaacatggaagactaaaggcggctttatcataaggccattatcatcacatgaaccagggcaatacacaggagataagttgttgtgtagagtaacatgaaggctggacaaatccttcacaggcataacatgagaccaacaatgtcccagaaaaagggaaaccttctctagaacaagctgttggcaaaaccctgctcaggtcttcacagccaaaagctggtcatgtccatggctaaaccagccatacagggcgggaatgacatcttcccaaggcttcagactactcctaattccctttagggattggaaagagagaggagaggtctgccttccctgagcacagtggagtggtggacacactctttggagagctgcagtgtgtggtgctgacatggcttctatcacaaccccagcagtgaaaaaacgctgataaactctacagtaagagaatgtaacttgtctccagaaagcttccaacacagctagcattcctagggaacctccccagggtgggtacttggatgaacaagtttcaacttgtagttgacagcgccctgataaggtctgttctcagagcttatctctggtgtgtgctgtgaacagggaaggagcacattctccatgctcctttctctgatgtgaatcttctgatgccgaatgagggtaggcctttggttgaaggctttcccacattcgctgcattcgtaaggcctgtctggtttgtgaactttcaggtgctgcctcagattggacctctgcctgaaggttttcccacattcgctgcactcataaggccgctcgccggtgtgaagtctccggtggttattgaggctggagctttggttaaagaatttcccacattcactgcactggtaaggccgttcaccagtgtgaagtctccgatggctattgaggctggagctctggctaaataacttcccacattcattgcattcataaggccgctcaccagtgtgaactcgctgatgtttcatgaggtcagagcttcggctgaaggctttcccacactcaccacacccgtgaggccgctcgccagtgtgaactatctgatgttgaatgaggctggcaatgtggctgaagaatttcccacattcgttacacttgtaaggtctttctccagtgtgaactctccaatgtttaattaggctggagttgcagttgaaagatttcccacattcactgcactcatgggcacttctgcccgtatgaaccctcttatgatgaatgaggttggaacgctggctgaagaacttcccacagtcgctgcactcatatggcttttcaccagtgtgaaccctcttatgctgaatgaggttggagcttcggctgaagaatttcccacagtcaccacacacgtgagggctttcaccggtgtgaaccctgcgatgtttaacaaggctggagtgctggctgaagaattttccacattcacagcactcatacggttttcctctattgtgaactttctggtgttgagtgaggtcagcggcgtaagtgaagaagattccacatttgctgcattcataaggcctttctctgctgtggattctctggtgctgaacaagagtggatttgttattgaaggcatccccagattcacagcacttgttatgccttagtgcaatgtgaaaatccaccacaccttcggtggcctcgtgcggctccccatcgctgggagtgacctcacactgcagaaaccctgctgtggccacaaagtccttcccaccctccctgcaggtggaaagctgatctgatgtgtggtctctgcaggtctttacaggggaagcctggccctcctccgttctgatagggttgtgtacgttctgctgcacctgtttccggggaaggtttgcactgaactcagagcctttcacatatgcctcacacacaaatggtttctgcctgggatgtgttgtctggtgttcagccaaatgcaaaatgtctttcaaacgtaggccacatatgtcacaggggcaggtcttctgggggcacagagttgcctcgggactcctgtcctgtgccactccttctacagaaacgttatgctcagaaggtaagtccttgccctctgttccatggcaaaaatctgaaagcagagaaatgctggtgaagttcgtataaactttaatagaaggaaagagccccatcacctatgcttggctgacccaagaataagcccatgggattgttggcaacacaagaaggctcaggtcagggtaaggaataatctgctccgccatactgtgcctggccaggtcacaaaatacaggaggccttatcaggaccagggacacaaggatgggggacagtattgggcagagaggcagggtctcccactcacttctctttaaaggccttttggcagggcctgggctgctggtaacctgtgagggctatgcagtgagagcatctagacccagcaaaacctgcaactgagtagctggtgttcaagcacatcaaggaaaagcacgtatctcacaacacattaagtgtaggccagtgttggaaagtgccgcagaggaagctgaaagagagaaacggaggccagaaaagtggggcacagccaaggggcccaactcagaataataatgacaagtagataatgtgtcaagcacggggaaggaaaagcagagacgtggtctggctactggcattggtatcaaatgatgatgaataggagagaagatgctggtatgatgtaaacacagtggtgaagtcacatcctcccctagctcccatcgctgcttaccagagccaggcctgccataagcccctctggccatggctgatgtcatatccacactgtcaggcacccagggctctttccccatctccaactgggaaacgatgtgggacctgaaagatataagtcctaagggaaagacagagtgggtcagtggccagcacctgcccagttgaactaccccatgatagactacaagacaggaagctccgtatgacacagggacattgggtggtcacggcaagcagtaaccacatcagtgattggaattcctggcacagtcaggcttaggaaatattagcaagaggaaaggcacagaatctaaaccacagaactgtcagatctggataatcacccaggagggaatggccgagtcagaggtagtcacacagctaaccgcaagacccctcatgcctggagcttccctgcaaggcttcaggcagcaggtgtgggggcagctcagggagaggagggaacaatgcacatagctcagccccagaagccacaacacacataccaggaaagtggggatggaagcagtgccagcggtctggctgtgggaaggaaagagctgtttcttgggcaaaggggacaggcagagaggagctcgggacaccggggtaggggtgacagccttacccagcgaggctataagtgcaaagttttccagcatcacatcgcagtacaggagtctctgagcctcatcgaggagcacccactcctcctgggagaagtaaatggtcacgtcctcaaaggtcacgcagccctgccatgatggggacagttcgttccatgatcagtctctgtccttgggactccctatccatcccctgctcactctcctccccagctccacagctccaggaggtagcaggccctggttctgtgggcgcctcatgtgaccactgtgtcagcccgcagcagcaacaggcagggtgcagagaggcaccctctaagctctgggcctgaagtccagggcccagctcgctcttctgccagcctcttcccctagtgtcaccaatgtcatgcttctcagatacaaatgtgggcttctcctttaaaccccagtccagagccctggggtgaacagctcatactccctcccacgtgcgtttcactctttggactgcaccaccctcacagctccagaccttcaccacggcctcccattgccactgctaccttctccccatcctggcccctatcctagccatctccatgggctcccacgagtcactctgcacatggcatccagagagtgcctggcaaacataagcaccatcccagcctgccccagacctttgatggcctccactgccaagggcaacacccaggtaagggggagagggagcgctccacccttgccttggagccccctagctcccctggcctggcttcaacctaagccacccacggcacacatggatgtcacatacacttggccttctttgttgcacattctgaccctgtcatcactcacactcatttaaaaaagaaaaaaaaagccaacccctctggccatcctacccccacccacctaagcccagcaactctgccaactgactcctcttgccccaagctaattccccagcctgaggacaaaccccatcaagggtcaccacagaagcctggtgagaacataggtgagtgtgtaagcaccagcccaggcctcactgcaatattacctcctctactgctaagcctcagcatccatctcattcatgtctacactctttgggatgatctggccacctgccagaccctctgatacacccacatagcccctccatcaccaccatgaccactactgttcctcacctgtctttatgatgccaaacaagccacagtccccaagcaagaaccctgctctcagttttccagccccaccttcctcttttttttaacatcattgtcaccatgacctgaagtttcacctcctaaatctcacacacagctacactcccgtccacacaccagatgtcacattttggatgtttctaactgttgaaataaacaaagaccaatgaaatgagaaaagccaaggctacttactcaaagctcactatagcaagagagactcaatgcaagccgggagtgggagagttttatagcaaaagaaaaggaaggcttcaggcgtgccctggttggaggctcctgttcgtaggtgggtgaactagaagtgggcatcctatgtgattggttagggtgcgtatctgcctttctctggttgttcttaaatcagaagcaggagcaaaaatgaggaaagctgtctgttattaatcaaaccctggccatttgggactgctcattacagaagttattgtttttacttcctggattgtcagtccagatagcaatctggcttcctgtgggtctgacagacagcaggctggcttcctgctgtatgggttgtttattgtagataagggggttggtttcctgggcaggttctggggcagagttctatttgtatacatgatctggccattgttcgaatgaatatccagtctctcattaccttaacaactccctcagaacacccgaactgtgtgttcagcggcccactcttcaactccatttgggggtctctgggacatcacaggctcaacttggccaaaacctaacttctactgcttccatggaaaattcctcctaaaaccaacttctcagttcataaagctggattcatcaaaccaaaaaccatggattcttccctcctctttctcaccctccacatcggaaaatttggtcagcttgacttaaaagacatcaagttcccaatcacttcctctacctccagtcctcactctggtccggccagccgcagcactggcctgggctattccattaggctactccttggcatccctgcttgcggctcactccatattcagttctccactgtgcatccacagggagcctgttaagacctgagtcacagcatcttcctcctctgccctaaaccttccatggctcccaacaccctcagaacagaggcccagctctgccgttctgagctgtcttcagcccacctgctctctggttccagcagacataatattaataacactgacctgggtggggttccttgaacactcccaactcagtctccacaccgtgccccaccccacccccaagcttttgcgcacgctggttcctgtgcctacaaagccctttctccctccatcccattacatttcagcaacggaagccactttatataaaccctgccctgattcaggatcctagctgggagcaactcccttccagggtcccctgactcaaaagcaaggaaatgggaaaggcgaaaagtcctagaacaaagccatcttttgcgtctcaacaccgagaacagaagcgtggggggccgacagcgaagggcctaacgtccaagcactcacctgcgcggggtcccgcagcgccgccgctgccatcggagtctgtggtcagagcagggccccacggtgcgggaaaccacggggcgggggtagggggtctcgcaggctgaggctaccacccacctggccgtgccccagacgaggtgtgaccccgggctgagggtcgcactcctagcctcagtctcccccgtgcaaaatgcgcaaggggcccggggcgcaggctccgggggcgccgagagcgcgcagctccgctgggtacccccgttgcaaggggtcacggctggtgcaaaggcgcggagggggtcccggcctcactgtccccctcgcggtccgggaaagccggcggggcagcttcacgggcgtagccccagccgccccgcccccaactcggggtccccagctcctggggactcagcctccccgccgggaaatgacctgcgaggctgcagtgcaggaagttccggcccccaccgtggcggccgggagagttgccctctcccgtactgtcattggcctggcgccagccgctggtgcacaggcagggcctggggatcgcgagtttctgcccagcctctcgtcaggctgagggtccagggcgggaaggagagcggatctcgtcgggtctccaccgccgccgcctgcagccctcgggccttccccttaaaggggccgctcccgagcctgcagccgcccgcgctaaaccccgcccaccctccgaggtccaggaggagagccccagtgctcttcctgcgcgtgtgggcatcggccagccgcttcacccctaagggacctaaattcacactggaaaatggggatagtacccaatgggcggggtctttgcgttgtaatattaaatgtcgctctgattcagggcttctcaaaccagcaacatcagcatcacctggggactggctgaaaatgcaggttctggggcaacaacttaaatctaaggactcagaaattctggggatgggattcagccttctctactttttgcggggggggcgggggggatgggtctcgttctgttgtccaggctggagtgcagtggcctgatcatagctcactgcagcctccatctcgggctcaagctatcctcctgcctcagcctaccaggtagatgggatacaggcgtgcaccatcatacacagctaattttaaaattttttgtagagactggatctccctgtgatgcctaggctggtctcaaactcctgagctcaagtgatcctctcacctcggcctcccaaagtgttgggaattgcaggagtgagccatggtgccaggcctccttctctgttttaacaagccctctggggactccaatgctggctccaactttacagcagggactctcattgaaatccagtaaataaaatgggaaaaataacactacattgttgcaggaagtcagggaccccgaacggagggacctgctgaagccgtgacagaagaacattaattgtgaagatttcatggacatttattagttccccaaattaatacttttataatttcttatgcctgtctttactgcaatctctgaacataaattgtgaagatttcatggacatgtatcgcttccccaatcaatactcttgtgatttcctatgcctgactttactttaatctcttaatcctgtcatcttcgtaagctgaggatgtatgtcatctcaggaccctgtgatgattgcgttaactgcacagattgtttgtagggcatgtgtgtttgaacaatatgaaatctgggcaccttaagaacaggataacagcgattttcagggaacaagggagataaccttaaagtctggctgcctgtgggacgggcaggacagagccatatttctcctattaccaaaaacgggtaagagaaatatcgctgaattctttccccagtaaggaatattaataattaacagccctgggaaaataatgcattcccagggcagtgcctctaaaatggctgccctgggagtgtctgccttatgcacatgtagatagggatgaaacacaccctagtctcctgcagcgcccccaggcttgctaggattaggaaattccagcctggcgaactctagtcagaccagttctctgctcttgaaccctgttaagatgtttataaatgacaatgcgtgcacagcaggacatggaagctcatgagtgattctagttttgccctgaccttgtgatctcgccctgaccttctgccttgtgatcttttgttgcccttaaagcatgtgatctctgtgacccacaccctattcgtacactccctcccctttgaaaattgccaataaaaacttgctggttttatggctcgggggcatcacggaacctgctgacatgtgatgtctcccccagacacccagctttaaaatttatctcttttgtactctttccctttatttctcagaccagccgacacttagggaaaatagaaaagaacccacattgaattatcgggggtgggttcccccgatactacatgtcatatggtgaaaccacctttgtaaaaattataactgagaaaattatgacagtgagagatctgacctaaccaactccatcttgcttctaacctccaagctgtccttgttcgttcctgagcataggcctaactaactttgggagaaactcagtttacagtttaactttgaagcaaagataacagccctttccctctaggccgggcatggtggttcacccctgtaatcccagcactttggcaggccgaggcaggcggatcacgagttcaggagatcgagaccattctggctaacatggtgaaaccctgtctctactaaaaatacaaaaaattagccaggtgtggtggcgggcacctgtagtcccagctactcaggaggctgaggcaggagaatggcatgaaccccgggaggtagagcttgcagtgagctgagatcgcctccagcccgggcaacagagcgagactccatctcaaaaacaaaaacaaacaaaaaaacccagccctttcctgaaacaaaccctcttcttgtctggggaccagactgcctttgtaggattaacaaaagccacaagattagagagtatggtttaggagtcatgcagccaggggccaggggtcacaagattttaaaccttcccaattgctactggggataacatcactattgtaaaacctaagattggtgctcgagatatttttcagacccagcactcgatggatcagctagtgccacccagattgataaactgggtcatctggtcctgtggtccccaccctggaatttactcagtgcagttagtcaactttgactccctgtgatttcatctctaacccaactaatcagcactccccactacctggccccccacccaccaaattatccctgaaaacctctgatcactgaattttcagggagatcaagttgagtaataactctgtttctcccatggcatggctggccctgtgtcagttaaagactttgtttactgcaatgccgtggtctttttgtagcaggcaaaaagaacccattgggtggttacaatggtagataacagggcccaggacagaattcctgctgggtgcataaaagctattgtcattaccaacaccatcatcacaagaatcttacaaacactgctgtggggcggcagggaagagacacctctgtgcagtcttttggatgtttgtcaaaatatacaatgactctaactcagcaagtaccgcctcagagggaatagttatgatttttacatgaaagcacaccatagtaacatttgcctacttgattttattttattattttcttatagctgcatttttttgtttttctaaatttataaaataatatataattattgtatgcaacatgatgttttgaaatatagatacattgtggaattgatagggacaggaggtagggaaattctgggcagaagaggccaggtccatcaagctgaaaatcttgataccacggcccaaagtgagaacttacatccctgttttcccactcaaatgttgccttttccaaaaccacccgtggctcaccctgccccccatcctatgcccataaaaaccccaggctcagccggcagagagaagaaaagcagctggacattggagactatggttggatgttggagagaagcaggctgacttcaaagggacagcttgacagcgtagctttggagaggatggccagggatggccaaacttcaggggacgattaccttcctgctccatccccttttcagctcctcttcctgctgagagccactttcaccggcaataaaatcccctgcatttaccatcttcaatttgtttgtgtgacctcattcctcctggatgccagacaaaaacttgggtgccatgagtgtgggtacaaaaggctgtcgcactgaccctccactgagctgttaacacttaagctatgcatggatggcaaagctaaaagggcactgtaacacttcgtcaggggcttcaggggtcacagcaccttcccctagacactgccgtggggctagtatggaatttgctcttgccagcacccaaaagccctcaccctgtctcctgcacccactcacctgtgctcccctccccatgaggggtggaacaacaagcgagtggagttcgtccctgacagcgcccatgtactctagttcccatccaagaaggggtcagggaaatatcctgcttcagaatgactaaatcaagctcattaacatatgcatcacttcacattgttttgttttgagacagggtctcattctctcacccaggctggagtacggtggcactatcgtggctcacagcagccttgacctcttgagctcaagccatcctcccacttcagcctcccgagaagttgagactacagacgtgcaccacaacacccagctagttttttgtatcttctgcagagatggagtttcaccatgttgtctaggctggtctcaaactcctgggctcaagcactcctccttgccttggtctcccaaagtgctgcgattactggtgtgagccatggcaccagccttagttatcttttttgtgttgagaagacttaaaatctactctttaagcatttgtcaagaatacaccgtaactacagtcaccaggttgtacaatagatctcttgaacttattcctcctagctacctgaaattttatatcctttgaccaacattgccccactcccaccacctggcaacctcagcctctggtaaccaacatttcactctatttctatgagacaacttttttaggttccatatatgagtgggattatgtagtatttgtcctctgtgcctgacttatttcacttaatataatgtcctccggttcaaccttgttgtcccaattgacaggattttcttctcttttatgaccaaatagtattcagttgtgtatctctaccacattgtacaaatccgtttatctgttgatgagcacttcagtcgcttgactattgtgaacattgctgcaatgaatatggcagtgcagatatctttttgacataccaatttcaattccttgtgatgtatactcagtagtgggattcctgggtcatatggtaattttatttttatttttattgatttatttctttgggacagggtcttgctctaaagcccactctggagtgcagtggcatgatcatagctcattgccattttgacttcccaggctcaagtgatcctcccgcctcagccccctgagtaggtgggaccacaggaatgtgccaccacacccagcttatttatttatttatttttgagacagggtctggctttgttaccaagctggagtgcagtggtgcagtcttggctcaccgcaatctccatctcccagattcaagcaattctactgcctcagcctcccaagtagctgggactacagatgtgcgccactatacctggctattttttgtatttttagtagagacaggtttcaccatgttgaccaggctggtctctaactcctgacctcaagtgatctgcctgcctcagcctcccaaagtgctggcattacaggagtgagccactgcacccagccactaatttatttttatctggaaaagaaaagaggttcatttggctcaaggttctacaggctgtacaggaaacatgacatcagcatcagcctctgatgaggcctcaggaagcttccactcatgatggcaggtgaaggggacctggtgtgtggagatcacatggcaggaagcaagggagaactattattactgtggggtcagcaccaacacattcatgagggatccgctcccgtgagcaaaacacctcccactaggccccacctccgacactggggatcagtttgcaacctgagatttggaggggacaaatatccaaattatatcaggtggacagtgtggctgaggctttccctgcttcagacggaattggacacaggctctgggagagaagatacaaagtgccgagaccagctcagtcagggagaccctaacccagcggcactagaggaattaaagacacacacacagaaatatagaggtgtggagtgggaaatcagggttctcactgccttcagagctgagagcctcgaacagaggtttacccacgtatttattaacagcaagccagtgataagcattgtttctatagattatagattaactaaaagtattccttatgggaaacaaagggatggccaaaacaaagggatgggtatggctagttatctgcagcaggagcatgtccttaaggcacaaatcgctcatgctattgtttgtggtttaagaatgcctttaagcggttttccgccccaggcgggccaggtgttccttgctctcattccggcaaacccacaacctttcaacatgggcgtcatggccatcatgaacatgtcacagtgctgtagagattttgtttatggccagtttgggggccagtttatggccagattttgggggtcctgttcccaacacaaaggggtgaggaatgaggtcgagtgttccaacacagttttagcaaatgcaggtacagacacccagggtgggtgtaactgaaacgcatgcttcatggagatgcactcagctgagatgcctgatgtgtgtggggagggtgggtgcaggttagcctgagcatggtggcagcgtgggattcggacacagaaatgatttgcaggagtcagaggagggtcggtgtgctagtaacctactgctgcacaacaaattatccaaaaacgcagaggcttaaaacaacatccttttattatctcttcgtttctgtgggtctggaacccaggcacggctctgctgggttccctgtttcatggtctctcccaagaatgccatcaaggtgccagccaggacaaatatctcatctcatggctcaactggaaaggggtcacttccaagttcattcacttcatacaacctgtcggactgagggcctcagttcttccccggcttttggcctgaagctgctttcaattccttccctcttgggccttgcagaacggagagcttgcttcattaaagcaagcaaaccaagaaggcagttgagtttgccataagacagaagtcacaatcttttgtaatctcatcatggaagccacctcccaccacctttgccatattctttgggttagaagcaaagtcataaagtcgggcccacactcaagggaagaaaatgacacaagggcacccaaacaggaggtggaggttgttggaggccctcttagaagtctgcctaacaccagtggggaggtcccgagagaaaaatatctcaaactaccctccccccgggtctggactctccttgagaactatttaaagagagaatcttttaagggaattaagtggcaaagaaaaaaagttataaaaatgctaatactccaaaaactttctggggagttcctaatggtttataagcactgtgcttagtttcttacgagactgccttttaaaaatagtaattaatgggctgggcgcggtggctcgcatctgtaatcccagcactttgggaggccaaggcgggcgtatcacctgaggtcaggagttgcagaccagcctggccaatatagtgaaaccccatctctactaaaaatccaaaatattagctgggcgtggtggtgggcacttgtactcccagctactcaggaggctgaggcagcagaatcacttgaactcaggaggcagagattgcagcaagccacgatcgtgccactgcactccagcctgggcaacagagtgagactccatctcaacaaaacaaaacaaaaaatagtaattaatggaaaacaggtaattcacctgtaatttatcaaaaccaaagcttcctcaccccaacccctacacagggtcaaattcagtgttttgtcctcgggaaaaacctgacagtgttctagttgtcttttgctgcaccacaatcatcccaaagtttcacagcttagagcgatgtgggggttttttggtttggggttttttgtttgtgtgttttttaagacagagtctcagtctatcacccaggctggagtgcagtggtgcaatcactgctcactgaagctttgacctcccgggttcaagcgattctcccgcctcagcctccctagtagctaagaccacaggctcataccaacacacctggttaattttttaattttttgtagagacagggtttttccatgttgtccaggctcgtctcaaactcctggtcccaagcattcatcccatcccagcctcccaaagtgctgggattgcaggcacgagccactgctccagaatcaaagcaatgtttattctgctcacgaatctacaacttggataggactcactggggctcatgtctgcttcactcagcatcagctgggccacttgaagacaggggactggaaccttctgaaagctctctcacttacaagtctggcaattgatgctggctctcagatggggctgtgaccaggatacctacaggtggcttttctgtgcatctgcttgggcttcctcacagcatggagactgggttccgaggatgagcaccctgagaaagagagagccaggcagaagttatccccttttatgacttagccttcaaagtcacctggggtcactcctgccacagtctcaggcctgctagattgaagggatgggaacataaatcccatatctccatgaaggagatcaagtcatcgaggtcattgtaaggagggcatgtggcataggatatatccgtgcattcacctttggaaaatacaatcagccacagagagcaaacaaccccaccaccatcccacccctgagctttcacgggtgtcagtgacaacaagcatcgtaggatgaaaagaagtcagcaatcatgaaaaaataaagcagcaagaagtacaatcctttccacctcgtctcccatgagagcaggaggttgggaatgaatccatctccctgaactagagaagagacgtgcaaggtcactgggccgagcctgtgggtttgggtttctcagctggcctgttacgatgaagcttgttcttgtctattgctgcacaccaaattaccataaatttagcagctttaaacaacacccgtttattatctcacagttttgtaggtcaggagtccaagcaggcttggctgggttctgctccggtcattacaaggctgaaatccaggtgtccgccagaaattctgttagccagggcttctatcatcagttcttctctgcagggcgctgctagggaggtcctgaccaccagagggcactagaaccacaatcccggtcccagggaactttgcttgtgctcccgcccctttctgtcaaaatgctgtccggccaccagcggcagcagcgtctgggaacttgtttgaaaagcagaacctcaggacttaaaaccagacctgctgaatcaaaatctgcattttgtcaactcccccacccaggcaattggtgtgcacccttgagggccaggctgtaactcagtggttctctaccttggctgcgtgttagaaccaccagaggaagtgtgtgtgtgtgtgtgtgtgtgtgtgtgtgtgtgtgtgtgtgtgtgtttgagatggagtctccctctgtcgcccaggctgtagtgcaatggcgcgatctctgttcactgcaacctccgcctcccgggttcaagcgattctccctcctcagcctccagagtagctgggattacaggctcccaccattacgcccggctaatttttgtattttagtagagacggggttacaccatgttgaccaggctggtctcgaactccttaccccaagtgatctgcccagctcggcctcccaaagtgctgggattacaggtgtgagctaccgcgcctggcccagaggaacttttaaaatccctgatgcaagggactacccccagagattttgattgcattggtctggggtgcagcctgctgcccggattgttaaaagtttccctggggattttactgtgcagttaaggttgagaagggctgcaagcctgggtcattgcacactgtaagaaccttgtgtatgaatggaactgtgctatggaacaactccacaccacctgtgtgtgtaggcataggagaaacacataaaccctgaccctcaagggtctcctggaatgcaagacctcagccctcaggggccttcagataaaggtgcggtcagggcaaacatggaacaccaaggacgtgtgatattattttccaggtgcttcaaagactcaagtcaaacaccaactgctcagatagcaaattctagttcacccaccccacccatgctcagtgatggggctcacggcagtttcctgtaagtgtttgctgggctcgcctttctaactccactgtgggccccctgagagaagtaatgagtcgggtccccactcaatggagccctgttcgcagttgcttttgtgacgtaggaagaaaccagctggtggtggaattggtgagttgtgctccaggaaagaaggtgcctggaagacagagatcagcgatgttaggaggcactctaaaaaaatatattctttcctatttatatagagcttcatggttcccaaagcactcttaggtgcactgttgcatttttgtaacacccatctgcattagattagagtttatctgtacagatgaggaaaactgagtgacagaggcgtaaatagatatgcgggaatttgcatgagtcaggcagaattagaacaagaaatcgccttcctaaatttcctaatttcctatatgctgtttccaggatgtagcaatacccagcttctgacttctctttcctcaccgttgagaccatttctgggggattttgtcttcattctttctttttgttctcctccccaaaattgtgggtttgtttagtcattctggaattctctgttaatctcccaccaaatgtccattgacgtacttgatttctcatttttgaaggaagattcaccaggtgtaaattcttaatatatgctagcaaagacaatgatttcatcacattataaacttctcgaatgcaagaaacttatttcccattttatctctagcacctttgacaaatatttgtggaatgaatgaataatgaatgaaggggatttgcaaagttaaatgtgagtgagggaggaagcagacccaggaaattaatctggagccagtctgcaggtggtgtggtgggcgtggttgtaacctctggaccaagagctgtgaacgatggtgcacaaagaaatactgtcagcaccacagagagtgggttttatcttctcaaataatggccaactttcctgcatcttcttcccttttcctgctcctcttgaggatgtattccctgctcaaatgaaatgctgaaacgtggctgggcgcagtgactcacacctgtaatcccagcacttggggaggccgaggcggatggatcacctgaggtcaggagtttgagaccagcctggccaacacggggaaaccctatctctactaaaaatacaaacattagccaggcatggtggtgcaggcctgtaatcttagctactcgggaggctgagggaggagaattgcttgaacccaggaggtggaggttgcagtgagccaagattgtgccactgcactccagccggggtgacagagtgagactccgtcgcaaaaaaaaaaaaaaaaaaagggctgaaacgttctttgaagaattcagcgagcctttggatactgactttcagtaaaggcctccccggctccgtgcctttttttctataaagtgtccttactcttctggggtcagaaacccttccccttctggggtccccaaacaatgctcctccctgagacaaatgaggtgtgggaaggatgtgagtgacatgcccttcttccaccaccagtgtttctgctgaaaccatattcactttattaaattaatcagggaagaagggacggggagaaatgaaaataaccaagcttgcagcacattcagcggtcatcatgaggtcatcctgctctctgacctgccctttctcacagtggtttggtgcctgttgttctagaatcacacagacctgttccaagatgatagttccccttaactgctctagagataagaacttgaacattacgaaatgttaagttttggccgggtgcagtggctcacgcctgtaatcccagcactttgggaggccaaggtgggtggatctcctggtcaggagttcgcgacaagcctggccaacatggtgaaaccccgtctctactgaaaatacaaaaattagccaggcatggtggcaggtgcctgtaatcccagctactcaggaggctgaggcaggagaatcgcttgaacccaggaggcagaggttgcagtgagccaagatggtgccactgcactccagcctagatgccaagagcaaaactgcctcaaacaaacaaacaaacaaacaaaagaaatgttaagttttccatttgagatattttttcaggttctgtatactgatgaaaccactgatgccatttggtctgaaggaacccacaggagctgctgactcactaaagaatgcagttttcacaccctgatttcatccccctaaccccaagcaatcaaccaccccaattctccagctcctcgtccttccatgatccccttaaaatcgccagcccagaactccttggggagatggatttgagggtttcctctcatgtcctcacttggcgccctgtgatcatgaaactctttctctgctgccaaccctgctgtctcagtggaatggtctgtcactgcacagtggatgtgtgagcctgttggtcctataacactgcttcatcagaatgctctgaggctccataccccaggcccaccctgcactggccagctccccctgcccttctccccattgctgtactcccaccctcctccactttcttccctgagagctggctcccagggtctgcagggctcatccaggttggttctgtggccaaggggcatggttccagctcagccccttctgccccttggacttgagaaccagggtctgcagtccacagtggagtaggccttgtgtatgggctctgggtccatacttaggaccttatgaggggcaggtgatggtagaggaagaggctacccctagtgggcatttgattggcaatgggaaggcttagaaaggggtcacaggctggagagcttcatggactgcatcccaccatgaaggaaatggaaacttggcttttccattctcaggttacaagggaagaaactttcatgatggtgttgataaagaatattctgactgaataagttggggccaatttggggttgggtctcagggaaatgaagaggctgtaagagcccaaatctttcccttcacgtggcccccagagtctttaaactctcctacttcttcaaggcccaagccccttccttcaactcatcttggatcacacgtgaacaaagtaacaaacatttattaagaatttgtattcacagcctggcacagtggctcacgcctgtaatcccagcacttcggggaggccgaggctggtggatcacctgaggtcaggagttcgagatcagcctggccaacatggcgaaaccccgtctgtactaaaaatccaaaaaattagccgggcatcgtggcgggcacctgtaatcccagcaacttggaaggctgaggcagagaatcgcttgaacccggggggcagatgttgcagtgagccgagatcatgccattgcactccgacctgggcaacaagagcaaaactctgtctcaaaaaaaaaaaaaaaaaaaaaaaaggatttgtattcacaaaacttcgtgccaggctggatgcagtggctcatacctgtaatgccagcattttgggaggccaaggcgggaggatcgcttgagcccaggaggtggaggctgcagtgagttatgatcaaaccactgcactccactctgggtgacagagcaagatcttatctcaaaaaaacaaaaaatcacccaattctgtgccacagggaaacttttggggactatgaatgcacacatttgctagaagccattgaagtatacactcaaaatgagtacattgtgtgtgtaaattatacctcaataagttgatttaaaaaaactgcatcagaagattggcaagaatattggtaattgtcaaagctggatgatggacacgtggcagctcattatgcttttctctctacttttgagaatgtttaaatttttcataataaaaaaataaatttattctgtgctaatacatttagttctgggaagcaaagtgtcattgggtatgtaagagtcacactttaattcttccatgtcacaagcaattcactgagcaccagccttgtgccaaacattgggctggtacactggaaatcttatgacaaggtcacagcctgcccttgtcccgatggtttgcacagtggagggaaagagaagggcgcttaacaaataattgcccaggtaaatggtgactttcataatccatataaagaagccagatgccatcagatatgatggaagaacccaccttgctctaggcaatcagaaaggctttctagaggaggtggtggttagactgggtgctgaaggatgaataggagagtgagagaaaaatacaggagcatttgttgttattgttgttgttgttttgagacagggtctcattctgcttcccagactggagtgcagtggcactcactatatagtggcactcatagctcaccataaactcgacctattgagctcaagcgatcatcccgcctcagcttccccattagctgagaccacaggtgccctccactatgtccggctaattttttttcttttcttttttgctagtgacggggtcttgctatgttgcccaggctggtcttgaactcctggcctcaagtgagcctcccgtctcagcctcccaaagtgctgggattacaggcgtgagccacaatgccaagccatacaaaggaatgtcttaattcagcaagcttttatggcatcaatgctatgtgattaattccaagtacttttccctggggaactcttattctaccaggagattccaaatggtggtaaacactttattatgattcaaagcgttaattactataatggaaaaaacctatctcattgggaaccaaggagagaaagaattcttggagagaattattgctgaagtatttacaatggaagttgctgctaaactgggtgttaaaacacagttgatgttcgctaggtgcaccaaaggtctgcatgaagcagaagtgctccagctgttcaaaacctcaaatgagcactttgttccaggaagaaagacaagggcctgaaactggactttggaaagcgggtggatttgtagaggaaggaagagcattgcaggaaggtggatcgcacaggttttaaggggtaccttctggtggtgtgtgagagacagagtgagtggagctgagggagcaccctgaagagcagggggatatttggctgggtgtttagctagggtagggtcaacacggaacccttcgatgccaagatgaggaggttggaaaggaccctgacaatgggacctcactcccagttgcattcccctatcactgcctcaactttaggtgtgtggaagagcagaccctggtggcctttcagtaccaagagtcatctttggtcaaaattgctgaggatcaggtctgactaggagcacctagtctggctggaggcagaggtggccaggagccgagcaccaggggagagagagctctcagcatgatgaggagagcaccatccagtttacatatttctttctggaggaatcttcaagttctcccaacttgattcaggacaggtgacccccaaactggggcttagcatgtgagggttcttggctttgctcaagaaagaattcaagggtgagcagtatgggccagtggtagggtagaagaaaagaggctcattgaagaagccgtgttacagctccatgactgctcctgcagagcaggactacccggtcccgtaggcagacagcagcagctcagagcagttctgcagtcagatttatgctcacatttaattgcacgtagattaaggggcagtttatgcagacatttctagggaaggggtagtagctttggggtcattatatcattgccatggaaaggggtggtgactctccggtgttgccatggcaatggtaaactgacatggcgcactggtgggtgtgtcttatggaaaactgcttccctcccgtccctgttttagctagttctcagtttggtcaggtgtctgagcctcacctctggagttgagcccacctcctacctcacgggtgtactgcagccagtgagtgtcattgagtccctgcatataacaaacagactccgagatctgccttcacccagtggcagttcatgaccttttggacatggtgcatagatagtgatagaatagaaaggcagtaacgtcatccactatgcattgtcttcgttctaatcacaaaataagtgtttgaaaaattaagcattatattttcaggtgcctttcaaattctagacccagcgtacatacatacatacatacatacatatatatattatgcataacacatctatgtgccgtatttactttttttttttttgagatgaagtctcactctgttgcccaggctggagtgcagtggcgccatctcggctcattgcaagctccgcctcccaggttcaagtgattctcctgcctcagccacccgagtagctaggcatgtgccaccctgcccagctaatttttgtatttttagtagagatggggtttccccatgttggccaggctggtcttgatctcctgaccagcctcccaaagtgctaggattacagcatgagccactgcgcccagcctttatttactttataactgtacttaccttatgtaatgagtatatatgaagtagtgctaaaatatacatatttaacatttaaatatcatgcagcattaaaagacatggctgggtccagtggctcccatctgtaattccagcactttgggagaccggcaggcagacggaatgaacccagggttttgagaccagcctgggcaagatggtgagactccatgcctacaaacaatacaaaaattagccaggcatggtggcatgtgcctgtagtcccagctactcaagaggctggggtgggaggatggcttgggcatggaagaccaaggctgcagtgagctgggatggcatcattgcactccagcctgggtgacagagcaagaccctgtcacaaaaaataaataaataaacaaacaaacaataaaagacatataaataaataactgtcctctaccttgcatccacatcccataatcaatcattttcgtcttttggctcttctattattgctttatgttgctgaataatttgcatattctaatatctcttttgcattttaatcagtattattgaaggatagtttatatacaataaaatgtgtctcttttttgttacttatcgttttgaaacacctgtattccacatgtgtttattaggtgtttacgatgctctaaaagtgcattacaaataagtcatcaaaccactagcttagcaaattcacacaggcatgtcagcagtggggaaaataaaacaattaattataatgtcccattaataatatcctgtaaatatcaaacacaacgcattttttttctttgtcctcattgcaaactatactgcctaggccatccgtaaacaaaaatttttgtgtgtattataagtatttccatcagtttgggattcttaaactcaaaattcttggctctaccagttgcaaacttttaaaattttaattctaatcagtcatataaatgcacaatagcaaaagtcaaagaattcaacaagatttctaaacccagcagctctcttctctactccatgccgtcccaccccatccccctctccagaattagccactctctcttttagtgcatagttctattttcatctccttttttttttttttttgagttggaatttcactctgttgcccaggctgtagtgcagcagtgccatctccgctcactgcaacctctgccgcccgggttcaagcaattctccagcctcagcctctcaagtaactgggattacaggcatgcaccgccacaccaggctaatttttgtatttttagtagagacagggtttcaccgtgttggccaggctggtctcgaactcctgacctcaagtgatccgcccatctcagcctcccaaagtgctggaattgcaggcatgagccactgtgcccggctccacgtttataaatagcaggtttatatacagtcttgaatttgaatgttatatattatcaacttactttttactagaagatgatgaattcgctcttttcactcctctcccacacacatatttccttccccccccttcaatcctcccagaattgtcatgtcatgatttttattaagttcactgattatgttatggagatcaggaaaatgttagagatgagctatgtcgtgcgctgtccttacatttctttctcatgcaaactttttgcttttctttacaactgtagttgagatttgtccttttctctgctttgaataatttaaactccaatctctgtccttctgctccaatctatactttcttcaagccagctgcatgattctcctgctgggacttcacttcaccatctagtcatgttggtcctccattttctctttcctggtttactcccttgtttagggtgaaaatatcttccaggagcttcctgagaaagactgtttgggaggaaactttttgagactttgtttgtctgaaaatgtctaaccctgtttccacttgagtgataatttgatagaagtccaggttaaacagcagtttttccccagagtgtccaatgtcctcccacctgtgatcctttgactgtgatctgtttggctttttttttttctctctctggaaacctctagaactgatgttctgaaatattattaccatattttaacaattgtggagcactctgcaggctcttcaaatttctttcagttatggggacatttctttaatactttcttcactactggagtttctgttttctcttttttggaatttctgaatttatcctctaattttcttatattgtctcttattatccacttttgtcttttattctgctttccagaagttttccttttagtttgtcattgttttttagagacaaattctcagcggctgggcacggtggctcatgcctgtaatcccagcactttgggaggccgaggcgggcggatcacaaggtcaggagatcgagaccatcctggctaacgcggtgaaaccccttctctactaaaaatacaaaaaattagccaggcgtggtggtgggcacctgtggtcccagctactcggaaggctgaggcaggagaatggcgtgaacccgggaggcggagcttgcagtgagccgagattgagccactgcactccagcctgggcgtcacagagagactccatctcaaaaaaaaaaaaaaaaaaagagacaaattctcgctctgtcactcaggctggagtgcagtggcactatcatagcccactgcagcctcaaactccggggctcaagcaatcctcctgcctcagcctcccaagtagctaggactgcaggcttgtaccacttgtaccaccatgccctgttaattttttaatagagatagggtttcactatgttgcccaggctgatctcaaactcctggtcttaagagatcctcccactttggtccccagtgtggtggtgttgggtgacgggacttttaagaggtgatttggtcattaagagagactgatgccattctctcgagactgggttaattctggaggcagtgagttctcactcttttgggactggattggttattgcaagggcaggctgttataaagtgaggttccccttaagttttgcccctttgacacacacctgcttctcttctgcttttccatcatgttatgatgcagcactagcccctcccccgaagccaaccagatgccacccactcggtattggacttttcagcctccagaaccatgagctaaataaatttctgttcactataaattacccagtctgtaatttatagtggtatattctgttataccaacaaaaaatggactaaaacaatcactgtccgtttagatttacccacacatttatcattttcattgcttgttattccatcttacagctcatattttccctctgatattgcttttctttcttctgacctaattttttaagaatttcctttagggggatatgttcatacaaaatatttcagtttttctctgaaagtgtattcagttcatcttcatccttgaatgattcttgggcctgcagttctagatggacatgtgttttctcccagcacatcaaagctattgttccattgtcttctcgttcccatttttgctattgagaaatcagtagaaagtctaattttgttttcatatatgtaatccatcctttatttccagccacttttaagattatgtcattttctttggtattctgtggtttctaggtatgctttttaaattattctttaaaaactgaatcgaggctgggcgtggtggctcactcctgtaatcctaatactttgggagaccaaggtaggtggatcacctgaggtcaggagtttgagaccagtctggccaacatggtgaaaccctgtctctattaaaaatacaaaaattagccaggtgtggtggcacatgcctgtagtcccagctactcaggaggctgagacaggagaatcgcctgaacccaggaggcggaggctgcagtgagccgagatcatgccactgcatggcattttcttcatctgatttttttttttttttgagacagagtcttgctctgtcaccctggctggagtacagtggcatgaccttggctgactgcaacctccacctccggggttcaagcccttcttgttcttcagccttctgagtagctgggattacaggcatgcaccaccacatctggctaatttttgtatttttagtagagacggtttcacatgttggccaggctagtctcgaactcctgacctcaagtgatccacccgccctggcctcccaaagtgctgggattataggtgtgagccactgtgcctggcctctgaattttttttaatgttgcttttatcctttttcttttgataactttgttcagtttctttgaataccctttcttctctatctttttaatgaaactttccaaacacagaaaagtcgaaagaactatgcagcaaatagctgtatacataccacctatgcccttaacatttcactgtacttgctctatatgacttttttatgtgtctaaagtgagttgcagacatcaggttcccacccctaaatctgccggttatgcatttctcttttagctacctttgacttggggggaactcttcctgtgccaagtaattgaagacatttgtgcacagtagggggaagcttttgtttctgcctagcaggaagcatttccagtttccaggaacgttgctaatttagaggaatatgtgtatgtgtgagttgcttaaacttcctttgccccagatggccaagaacagcatccggaaagccacttacagtgcagcagctcagccccacctcctcctggcaagcaggcagcatcctgtccagacaactgtgtgttgatccctcctccagcactgctttcctggccccagacatcaatggcagcaagtgccaggaaggttccaacggccaggctgtatctctcactctttgtgttccaaacaggtgactgctggtttgcccatcacaacgagcctcttgtgccttgtaggcttagtctaagatcagaaccatgggcactccttcttggcttcctcctcgactcacttgacttttcctgtgttggtagctcttcctcctctgacctttcagataccccctagttatgccagaagtgcagagtgcatttatgtttctgaatcctccttgctggtctggtgtaattcctgaaagaaggcatactgcagtaattttacttatgattctttttgcaactagcaagatcaaccagatatttatttattttcattttttagaaaattttaatataattttaatgttgtagggagcatggggaatatggagaagggcaggaagagacttttgtgggtgatgttggttagcttgattgtggtggtgatttcatggatatatacaaatgtcaatatcaaagataaaaattgtataatttaaatatgtgcagtgtatcatatatcaattatacttcaataagcctgttaaaatagttttaacaatgatgatatattgcaacttttatgtattttaaactaattgagtttttatacatgaaattgtacatgtaattgagtttaaaatacgtaaaattttaatgacaagttaaattttataacatacattcagtaaagtgcataaatcttaaatgcatagtataattaatttttcatatgactaccactaccactcagatgaaaatatagaatactggctggaagcaaatggctcatacctgtaatcccagcattttgggagaccaaagcaggaggatcccgtgtggccaggtatttgagaccagcctaggcaacatagcgagaccccatctccacaaaaaataaaaagtaaaaatattagccatatgtggtggcacatacctgcagtcccagctactcgggaggctgaaatgagaagatcagttgagtctgggaggttggggttacagtgagttatgattgtgtcacttcattccagcctgggctacagagcaagaccctgtctctaaaagaataaaaaaaaatatagaatacttccaacacttcagaagatccctcgcgccctcctagtcattatcccctgagggtaagcactattctgacctccatcaccatggattggtttcgcctgttcttgaactttatattaatggagatgcattcacgctgatacttgcggcaatagtttgctcattttcgttgccatatagtattccactgtatgaatatatcacaatttatttattcattctctttttgatggacattagggttgtttcaaggttttggctgttatggataaagctggtatgatcattcttattcaggacctttaatggacatttgtggtctttttacttgagtgttgtagtaagtagtataatagccccccaaaagatatgtccacatcccaaccctcggaacctgtgacagtgactttatttggaaaaggagtctttgtacatgtaattttttttttttttgagatggagtctcactctgttgcccaggctggagtgtggtggtgcaatctcggctcactgcaacctctgcctcctgagttcaagcaattctcctgccttagcctcccaagtagctgggattacaggcatgcaccaccacacccagctaatttttttttttttttttttttgtagagatgggatttcaccatgttggccagccttcaccatgttggtcaggctagtctccaattcctgacctcaggtgatctgcccacctcggcttcccaaagtgctgggattgtgggtgtgagccaccgcacacagcttgtacatgtaattaaattaaggatctcaagataagatcagcttgtattatctgagtgggctgtaaatccaatgacaagggtccttgtaagagacacagggagtaggagaaggccatgtggagacagaggcaaagatgagggttatgcagccccaagctaaggactgtttagagccaacagaagctggaagaggcagggaaggattagagccttcagagggaacatggcgcggctgacaccttgactttggccttctggtctctagaacactgagataataattctgttgtttcaagccacaaagtttgggatcatttgtgacggcagccaaaggaaattaataatacaaaagttcactttattaatactcatttatatttgtttgtgatgtgcacaacactccaatggaaattttaaaaagtgtttggagtacagactttcccaagcctggctaactttttcttccttctctgggaatggatgttttgcgcagtgtacagaagtgtggagagtgaccccaatgtccttgttgatgtgtgtctgtaaatcttacctgtcacagtgtgggcactctgagagccctgtgtccccaccagaagcatctgttccttatgcagcctgagtgtcctctgctagggtggccagttcccctcctcctgccctgcctttttgcaggttcacaggtgcaagactggctgtttcctgttaatattaactatacttgaattttcaaggatttttttaagaaaaaaatatataatgccaatacaaaaaaaaacacaggaaaaaaaattaaccttactaaactaaacctgccctgataggagggttcttctcacaaacctgactgcagagcaaaatggaattgctccaatttctccctttgcaaacaggcatgcatcaacttctcattttaacaactttctttctttctctttcttctttctttctttctctctctctctttctttttttcttttttttttttcagacagtcttgctctgtcacccaggctggaagtgtagtggtgcgatcttggctcactgcagcctccatctcctgggttcaagggattctcctgcctcagcctcctgagtagctgggactacaggtgcacgccatcacacccagctaattttttgtatttttagtagagagggggtttcaccatgtgggccaggctggtcttgaactcctggcctcaagtgatccacccgccttagcctcccaaagtgctgggattacaggcatgagccactgtgcccagcctttaacgactttcttaataagtggtgtgggaaaacacccagagctaaacaaaaccaacatggggaagtgacaagcatttgagaattcttacatttctcatagctgtattcccccagaatctggtatccagctttttttttttttagtctggagacaggttggagtgcagtggtgtgatcagggcttactgcagccttgccctcatgggctcaagcaatctgcctgcctcagcctcccaagtagatgggtccacaggcatgtgccatcagcctggttaaattttctattttttttggtgaagatgaggtcttgttatgttgtccaggctggtctcaaactcctgggctcaagcaatcctcctgcctctgcctcccaaagtgcagagacgataggcaggagccattccagcatctcatatgatgtggttgttgaaatcgactctctcgggaacatttaacaatagctaaaacagttgagtgggcactgggtgtgtgcttcagctcaggctcttacttatattgttagattccctcaaaatccctggaggtggggaatttccttgaggtgggggttttccacgctttccagatgagggctgtacgctcattgactagaggcaccgtgtctaagtgtctgaggcttaattcccattctctagaagagcagctgactatgtgtatgtcagtgggaaaggggagagcccagaaaatcattgcagtttatcacagccacccccaccccctccatcactgcagaaactgagcctccactatcttggagtttccttgaagagttcccagtcttggtgaaatatgggatggacggccaggcacagtggctcacgcctgtgatcccagcactttgggaggccaaggtgggtggatcactttaggtcaggagtccgagaccagcctgaccaacatggtgaaaccccatctctactaaaaatacaaaaattagccaggcgtggtggcgcatgcctgtaatcccagctactcgggagactgacgtaggagaatctcttgaacccaggaggtggagcttgcagtgagctgagattgcgccactgcattccatcctgggcaacagagcgagactctgtctcaaaaataataataataataataataataataagaaatatgggatggaatttccattggatgttaaagatccttccaaaataggtattttccacagaaaatgttatatttggtctgacaactccttgcaaaaatgaactcaaatggtcaggaatatttgttgctctaggttttcagaagcagaatgggcatcctttcttagaatacattctgggcccctcagggtgttcagggtgggaataaagtatataaaatgagaagtcaaaacagggaagaggtactaggggggaagctgggcagaggaaaggaacccttgggaggcccaaactttaatgctctggttcataaaatgcaaaaaaaaaaaaaaatccattctcatccctcctgtcctgttattgtcaagatgctagctccttggacaattcaggatacaccaagctttctccccggatagccgcaagtttaagggcaggaaatggccttggactgggtgcctttgctgagagaacagcagcactttgatccaagatgtccaaaagacaaagcagaagttcatgagaaacagaggccccagcatcacttggggtggcggggagggacctgtgcagcttgcgccatggacacctcgttagtgcataggagtgcatcagttttacagaaacggggctccatctagcccaaagggagaacgcccaggctgtgatcaaaggattgagggtaggacatcaaaggttagggactttcccgagtggaaaatatgggaagggattgggtcaaaaccttacagagaatgtgggcgagatttggtaagacgtcaaaacttaaccagacccaagtgggcatatttaggggaaaaccagaagtcatagttcattggaaacagacagatacggtcaacaaatcttcatgtatctggggagtgcaaatatcacgttattccttattgtgtgtcagaaatacgcaagcccacactgtgttgagtacctgcgtgggagtgggagatgttcaggcctgcacacgacctatctgtgcctcagctcttcttgtggaaaagtgctatagaaacagcacaagatctggaccatccaactcaccaacccaccccagctggaattcagtaggcagtcccctgaccctgttattcctctgaatatgagaaaggcagagataacagaataggagggcgatggtttcaatccacagggctctttggatgagaaaacatgggggtgttgttaggtagccctggtctgcttgatatttcatttctggccaggcgcagtggcacatgcctgtaatcctggcactttgggaggctgaggcaggtggatcacttgaggtcaggagttcgagagtagcctggccaacatggtgaaaccccacctctgccaaaaatacaaaaattagctatgtatggtggtgcacgcctgtaatcccagctacttgggaggctgagacaggaaaatcacttgaacccgcgaggcagaggctgcagtgagctgagattgcgccactgtgacaggcgtgggccatagcacagagcctggtaaccaccattctattctctgtttctatgtatttgagtttttttcaggttccacatataaatgagatcatgcagtatttgtccttctgtgtctggcttagttcacttagcataacatcctccagattcatccaaatggcagggtctcctcctttttgaaggctgtatagtattctgttgtattgtataccaagtacctttatctattcatcactgatggacacttaaggtgtttctatgtcttggctacggtgaataatgccacaatgaacctagtccaaaatgggaagtcctcaaatatccatcaatgttaaatcattaagtaaatagtggtatttattcacaatttatttcataggtggaatgctacacaatggtaaaaatgaacaaagtttagccatacacaataaggcggatgattcacaaccacaatggtaaatcagaacagctgggccgggcacagtggctcacaccagtaatctttgggaggctgaggtgggaggattgcttgagcccaggagttcgagaccagcctgggcaacatagcaagaccctgtctttttaaaaaatacaaaaattaggcagatgtagaagcacaccaggtacttgagaggcttaggtcggaggattgcttgagtgcaggagttcgaggctgcagtgagctgtgatggtgccactgcactcaggcctgagcaacagggcaaaaccctgtttcaaaaaacaaaaaaggaagaagaagaaccctaaacaaaagaattctaagtgtatcgttctatttgtatgatgttcagaaactggcaaaacgagagcttttgggaatacgcactcaagtagtaaaactctaaagaaaagcaaaggggctgggcgtagtggctgatgcctgtaatctcagcactttgggaggccaaggcgggtggatcccttgaggcaggagttcgagaccagcctggccaacatggtgaaaccccgcctctactaaaaatacaaaaattagcggggcgtggtggcacgcacctgtaatctcagctactcaggaggctgaggcaggagaatcacttgaacctgggagatggaggttgcagtgagccgagattgtgccactgcactccaacctgggtgacagagctagactctgcccacccactcccgaaaaaaagcaaaggaagggaagagggcagtgcttgtcttcaggaggaagagggtttggtgggaagacacttgtggtgtctaggggtgctgaccgcatgctttttcttgatctcagtagcggttgcaaggtgtatactttataattacatattaagctgtgcattcatattttagtcccttttctgcgtgtatcatctgtcataaaaaggttttaaaaaacatgaagcaacaaagaaaaaattgctgatggacacttatgtgtcttcacacaagatatgaaagaactttacaagaaaaacttaaaaaaagaaatagagatgggatctcaccatcttgcccaggctggtctcgaactcctgggctcaagcagtcctccgacctcagcctcccaaagtcctaggattacaggtgtgaaccacagtgaccggcacccccaccaaaaaaaaacaaaaaccctttattttaaaaaatgcctaaatgaggccgtgcgcggtggctcacgcctgtaatcccagcactttgggaggctgaagcatgcagatcatgaggtcaggagaccgagaccatcctggctaacatggtgaaaccccatctctactaaaaatacaaaaaattagctgggtgtgatggtgggcgcctgtagtcccagctactcaggaggctgaggcaggaggattgcttgagtccaggagttggaggctacaatgagtatgacggcagcctgggatagtgcaaccctgtctctaataaataataaaattaaataaaaaaataaaaatgtaagggaatgataaccatcaaacaaagggcaacggagacttctgaaaggaagacaaaagtggaatggggaggggcccaaggcagtcacagggtactccctggtaatgtgctgattctcaaactgagttggtggatggagttagggggtcgttttattgttctacaccccatatcttataacattttactgttatacattataacccacatctacgggtatatgtcaattctcatataataaaactggcacagtggctcatgcctgcaatcccaccacttttggaggccgaggtgggaggatcacttgaggtcaggagtttgggaccagcctggccaacatggtgaaaccccgtttctactaaaaaaattagccaggcatggtgatgcatgcctgtaatcccagctacttgggaggctgaagccaaagaattgcttgaacctgggcagtagaggttgcagtgaactgagatcgtgacattgcactccagccgggcaacagagcgagagtccatcccagaaaaaaacaaaacaaaacaaaaaaccaaaaaaaaaactggaaaagtaagagaaaagttcccagacctcagccttggggaatactaccagctttcacggaccagggagaggggcaggagttgtgcacgaaacgagatggagctgcatgaggtgggagaagaggaaaccgtgacatcgcagcggccaagggagccttccaggaggaagaagcgtctcccagggtcagggcttctaagagcagttggggaagacgaggactggaatttggatttggccacctgggggtgttttctgaacttggaggagcattcttgtgcccctacgatgcttgcagcagctaaggactccagacctgcagagtctgtcctgagacaggtcagacctcggcggtgggacgggaaaggggaactctctgtctagagacttgcgctccgatgtagttggaggtgctacactgtggctggccacagaccaacacgagcaatggaccacgagaggcctggggtagttagcctttccttcctgtgcagccaagaacggaaggatgagaggggttctttctgcctcctccttggcatgagcacctccacctccatgcccactctgtcctttctcccaggagcagctggccggagagtaacacgactccagccggacatggtcatgactatttcagcctgcaaggtcatgactctctggcccacctaggactcctaggggaaaggaagtgcctggtctaccgcccttcccctgcaagtctgaatgctgtgtggacagaggaggaggacccaataaggtaggggtattggagtactcgggtgcctgggaagatccaagcccggcctatagggtcaaggtcttttccaaaacaggggaaaccctttctggttcccgaaggtcctcccttccctattcgctgaacaggtgggtgccaagaagcccctgtcttgaggacagagagactgcggtctggcctccccagacccaggcagcctctaacatcacagccacagagcagaaactggcctggcttcctcccaggcccagaaggccccagctggccacctccctttgtttgtcttgggaggggcaactgctaagcaaacagggaaggggaatcccgattcggcctctctgtctgtccggctagccgttacccaggcccgggctctggtgcccactgaggcctggctccttcctgaccctttgtgtggaagggacacagggcaggagtgggtacagagaacacccagggctttccgaaaaaaatagcccaggcctcccacagatgagagaggagctatgtggttcggtaaacctcagttccagctacaggcaaatgggattaactgagcacttactgtgttggggccctggcctagccccatgcatgccagagccctccagatactgcctggccaccctgcagggtcctatcagatctcgagtctccaaaagaggaaacaggcttggggtcataagggaatgaggttagcaggggtggtaatcccacccagatctctctgactctcagatcacgggttttttttttttttttttttttttttctgagacagggtctcgctctgttgcccaggctggagtgcaatggcacaatcatagctcactgcagcctcaaattccgggattctcatgtgatcctaccgcctcagcctcccgagtagccagggctatagggacgtgccaccatgcctagctaatttttaactttttgtagagataaggtcttgctatgctgcccagactggtctcaaactcctggcttcaagtgatccttctgcctcagcctcccagagagctgggattacaagcatgagccactgcgcctggtccccaactgtgctcttaatcatagctcatttctcttagtggagccacgggggaaggtggtaagggggcttaagcgggagctctatccctcatctcttttttctctttcccagagaccacaccgctgttccagaccctctccatggatgatgtcctgcccctgatgccttgggagaccctgttggcacagggcagtccccagggctcgcctgacctcccagcagggcagcggaagcagcagccacagggtgacagggcccagggcctggcctctgagtcctggaagctcctggaggtgcccatcattcacataacgccatccagtgatggggagtcccccgcctgcaccccaaccccccgacgccggcagcagcagaggatgccagacccgcagagtctgtcccaggacaggtcagacctgggcagtgggacaggaaagagggtctctctgtctagggagggttctctctgtcaagggtgggttccttgtggctgcgggtcagagcacaaccttagccccacagagggctgactcaaagccacgaaacagatgcacaaacaaaaggtaaaaactgagggtgtgcgttgggacaaccagctatgactgagctcagctgagttctgcctagtaagagtggaggggaagccgggcgtggtggctcacgcctgtaatcccagcactttgggaggccgaagctggtggatcacctgaggtcgacagttcaagaccagcctggccaacatggtaaaaccccatcttgactaaaaacacaaaattagccagcgatggtgatggatgcctgtaatccaagctattcaggaggctggggcaggcggtttgcttgaacctggtaggcggaggttgcagtgagccgagattgcgccactgctccagcctgggcgtcagagcaagactctgtctcaaaaaaaaaaaaaaaaaagagtggatgggtggagagggaccccacccagtgtttttcaaactgtaggtcaagacccatttaagggccataaaactaatacagtgaattgcaatcagcccttgttttttgttttttgtctttttctttttgagacagcatctctctgtcacccaggctgaagtgcagtggcatgatcttggctcactgcaacttccattgctcccccctccacccagcagctgggaccacagatgtgcaccaccacacctgtctattttttttgtatttttagtagagacgaggtctgaccatgttgcccaggctggtcttgaactcctgagctcaggtgatgcaccctcctcggcctcccaaagtgctgggattgtgagatgaggcacccggccgcaatcagcacttctttatccaaatcaaaataaaatagaattgcaaataacaccatgcgtgaggcctaatgagggtaagtgtggtttcttacaacttctgtggcattatgtgtatttctaagtgcgtgctggaagcccatgtgaaaggtatttcctgctgtagatcacaggccaaaaaaacaaaaaaaaaaaaaaaagaagaagaagaaaaacaaagaaaaaaagaaagtttaaacaaaacttctgaaaagaaacactatctctggtacaaggagacaggaaatgggaggttcagggccatagggggaagaggaaagaactctaccgaccctgaatagaacaagcagccactgtggtttcttccaacaagggacactccataagcgttaaagtttaggaagcagagctttgtgcatggatgtggagaaatcgcagaaacaatgataatgggggacagcaagttgcaaatgaaacagagggagcctaatcgtgtatctttttaaaaagatactggataataggtgatagtgttggtggatgcctcctgatgtagaaaaaggacagaaaagtacacagggtccaggcgtgctggctcatgcctgtaatcccagcactttgggaggccgaggcgggcagattaacctgagatcaggagttcaagaccatcctgaccaacacagtgaaaccccatctctactaaaaatacaaaaattagccaggcatggtggcgcatgcctgtaatcccagctattcaggaagttggggcaagagaatcgcttgaaccgaggaggtggaggctgcagtgagccaagatcgagccactgcaccactccagcctgagcgacagagcaagaccttgtctcaaaaaaaaaaaaaaaaaaaagcgcaggaaggaaacacaccaactgcatggcaggcagaaggctccttggggggcacgggaagggaaaggagggatggggagccaggcctttggttgtaagtgtaatcatttatttcttttaaaaaaaggacctgaagcaaaatggcaaaatgtccacatctattctatataggtacaggggacatagaggactgttatattttcttcctttttttttttttttttttttttgagatggagtcttgctctgttgtccaggctggagcgcagtggtgcgatcctggctcactgcaacttccacctcccgggttcaagcaattctcctgcctcagcttcctgggtagctgggattacaggtgcaagccactacacctggctaatttttttgtatttttgatagagatggggtttcactctgttggccaggctggtctcgaactcctgataggtgatccaccctccttggcctcccaaagtgctgggattacaggcgtgacccaacgcgcctgacctgaaataaatattatttaattaaaaaactaaaagcattacactagaagaaacagaccaaagagaaatctaaagagatcagttggacagaggaaggtggtgggaggagggcctctcttccattggccggtgggaggcagcaaatgtcagatggtggatgggggttttagaggtgggggttagcatgagaggtagggcacggcgatagggggggtgctgtccatgcagagggaataaccagtgcaaaggtcttggggtaggaggcaggaaggtgcctggtgagttagaagaacagcgggtaggctggatggggggtgtgagccagggggagatgaggagctgaagtcagagagctgacaggggccttgggtgccaaggtgaggactttgcttttacctggagtgaggtacagctggggcagggctctgagccaggagggtagttaactgactcaggtggtcccaggctctctctggctgcaggtgagaacagacagtaggggcagggatgggagcagggagatcaggcaggagaggatggaggctgggccagggcgtgggcagcggaggaagaagagtttagaatggagcgattgattttatacgtggagcccacagtttgtgacggattggatgtggtgtgaaggaaaagagagggtcagaaaagactctgaagttctgggcctgccattcatcaaaatggagaagtcaggtgggcttcttttgcaggaggaggggaagggttgatggagagggttgggaagggagttttttcaaaagaggcggggacagcgtaccctggagagcgctggggagccacagccccggagctgtgaggtgggactcgcatttctgtgtggttgggccaggagtccaggacaccacctgactctgacctcttgcagacggggcgggggaggggggacgcaggttatggcgtcagagcaggatcgaatccaactctgccgcctacctaccaggtgaccccaacaagtcacttcccatcttagaggccgggcttctccttccgtaaaaggactgattttgcccgttcctgcgctgtccccgggaaaagcccttaccaccgagttagtgggactcccagcactggggtgatgagcgcaaggtctcagcacagataagagccagggaggctggattctgacttggtacttggcctggctgaccaaaactgggaagtccctagaaacggaggcaccggacctcctgggaccaggaacccgggctcagagactgggagagggaaggaggaggcggccaaccggccccaccccttcccgccagcttcaggccccctcccccatacatacacctcggtttcccagcatctccagtcctcccccaccttcgccccggctctcaggttcctccctgggaggtccaggagcttctggccaggggcatagtagttgctagggacccttttctaggtactaggggagggggctccccaacctgcgggcaggcagctgcctccacgatgtttggttttaataaagtctctttgtttccttctctgtctctctgcccctctgctttcccttctctgtccagtccctctctccccggcttctccctccttctaggcctctgcggcccctccccgccttccctcccgggctgggggcggcgccgtgacgcggcggggcgggggaaggaagggggtgtcgctgacgccgcggcggcctccggcggctccggccttttgtgcgggcggttgggtcgggtgggggcggcggccgcggaaggccaggccggtgccctgcggggacgcccagcgcagcccagccccgcgcagcccagccctgccctgccctgccctgccctgcgcccggggcgcgcccaccgcgccgcatccatgttcgagtaaggaccgggcgactagagctcagggaccgggcgcgcgggggaggccaccggagggagggggcgccgcgggcttggggagggggcggagcggccgctgcagaggtcgggggcctctgcacatggctctggccggggcgatcggggtgggggcggggcagggggcccccgggcgaggggtgcagctggggagtggggcgcggacgcagggcagggcccggggtctgggtcgccactgccggcccgcgacgcactgggttgcggggtttggctgggggcccgcgggttcatctggcggggagggccctcaggcctggcaaccccctgcctggtaagccaggggtgagcgcgaggccgaactggggctccggcctgggatggagacaggatcgggaccagcccaggcccacaggccgcggagccctgggcgcgccgggagtaggcagccccctcctgcctgggccccctcccaccgtccttggctgttgcgggtctcggggctgccgggggtgggggcttcctgcgtctctccaggaccgcgtgcttgaggtcatggagggcggggggtcctgtgtgctcggaattgacttcttactccccttccggtccaggtgggcgcatgtgcttccgactgtgaattgtcttgcaagtgtgtgtacgtgtgtctggggctgctagcctgcagcagctttgggcctctgatagagttcctgcgtgtaacttaaccactaattctgaccgcggctctgtgtgtcactgtaagttacctgtgtgtgtctggggctccaaatctgtggctgtgagcagctggttgtgtgcgtgttgtgtctcattccatctgtagctccctgtgcaaatataaattacccctgtgtgtctgagtgtgacgttggagtgtttgtacatgtgtctggagttaccgtgtgtagcagctctgatccttcttgggctgtgtgtgttttaccattaattctatctgtagctccaagcgttgctgtaagttaccagtgtgcgtcccattgtgacttagtggtgtgtgtacaagtgtgcctggggctctgggttctaccatgaccctctgtgcctgcatatgcctgtaatttagctctgaaacgctcttctttttttttttttcttttgaaatagagtctggctctgtcgcccaggctagagtgcagtggcacgatctcggcccactgcaacctcctcctgctgggttcaagcaattctcctgcctcagcctcctgagtagctgggattacaggcgtgtgccaccacgcctggctaagttttgtatttttagtagagatggggtttcaccatgttggccaggctgatctcgaactcctgacctcaggtgatccacccacctcggcctcccaaagtgctgggattacaggcttaagccatcgcgcctggcttgaaactctcatttagctctgtgtgccaatgtaagttacatttgtgacattgttgtgtgtctggggctctgtgagtgtggctgtaacttaatttgattccatctttgtgtgaacattcccttgtgtattcctttgtgacagtattgagtggtgcctaggcctctctgtgtacagctgagaccctctgtggttttgtgtgtgtgtgaacagtgtgagaccccttgtggctctctgtaggcttggaaccctcccttctaagaccctgggagtacccagggcactttggaggcaataatgataactgacgttgtccacctgttacagttagtatagcatgtgccacgcattattccactacctggccactgtgtcctcgagatccacgccctgctcggctgcattattcccaagtcctgcttgactgtgagcatcagggctctccaccagctacagccactgacacctccaccccttgccactttactttttcttttcctttttctctttcttttagacgcagtctcgctctgtcgcccaggctggactgcagtggcacgatctcggctcactgcaacctctgcctcctgggttcaagcgattcttctgcctcagcctccctagtagctgggattacaggtgcgtgccaccacacctggctaatttttgtatttttagtagagatggggtttcaccatgttggccaggctggtctcaaactcctaacctcaggtgatccacccgcctcggcctcccaaagtgctgggattacaggcatcagccactgcgcccagccccttgccactttagaagtagccttttctctgtcttccctgccagatggtgagcccagtgcgggcacgggaacaactcagtggggatgtgttggctgaccgtgggacctgatttacctgggactatgtatgtgtcacctggggtcttttgggactggtctttcactgtatggctgtctttggctctttgctgagacttcctcgtggctatgtgtgtgaatataatttatccgggactttctgtgggttgctgtatgtttctgtgaccctctgcagctctgtgtctgtgtgcacacatgcatgtgtctggataacttttctgggaaattgccatgtgactgtagcagactagcaatgctgcaggtgtgtgtgtgtgtgtgtgtgtgtgtgtgtgtaattactctgtggctctctgtagcatacctatgatgctgttgctctgtgcgtgtgtgtgtgtgtgtgtgtgtgtgtgtgtgtgtgcatatgagagagagagagaggaaagagactccttgcaattgtagggaaatgcagtttacccctgacacctactgtgtgacaatcattgagtttcccttttatgcacacctgtggatgcatccgcccttttctgaccagaggctgctctgggtccactggggcctaggaagttggaggtcaggtgtctgcggaagcaaaacaacatcccttccgagtctcctcgcccctataacagtcccccaggctcctcccttcactctgccttcagctatcctggttgggcagccgcagggtccgcccttgagtacttcctctttgcccagccctggagcaaaaactgggggcgtggtccctgccctgtctgtgtgccttgagcctctcttcaggattccggcccccaggccctgcccctagatctgtggctgcgggaaagtagggcaggtctgtgtttcaggctagagggctgagaaaagcaggcaggggaggatgtggtcctgctgcttaggagtctctccctgctcaccagtgctgtctgggtgaagccaaactcctgactagggtcaccaggcctgtgcacctccgctactccctcagccccactggccacctcactcacactcagacctgccaggctcagtcctgtccctgagcttgatgttctccacctggagtcttctcccagcctttgccacatgtgttctttgtcctcaggtgaacaagtgggctttgttcaggaaggcttttgctgactgttactaaagaaattggttgggcacagtggctcatgcctgtaatcccagcactttgggaggccaaggtgggaggatcacttgaggtcaggagtttgagaccagcctgggcaacatagcaagaccccatcactacaaaaaaactttaaaaatcagctaggcatggtggtgtgagactgtagtcccagctatcagggaagctaaggctggaggatcgcttgagcccaagagttcgggcctggagtgacctgggaggctgaggattgagaattccttgagcccaggagttcggagctgccgttaaccatgattttgccactgtactgcagcctgggtgacagagtgtgaccgtgtctctaaaaaaaatttaaaaagcatctctgcccccctagttgtcccatcccttatctctgtggtcctcaaacttgaatgtgcgtcggaatctctggccccaccccagttctgattcagaaggttgggagtgggtcctggactctgccttttgaacactttccaagtcctgcctgctgctctctggggctcatactgagcagcattgctttatggcgttcaccagtgtctgaggtcgccatccctgctcacttgttttcttactgacggtctatgtttccctgtttcagcgtcaggtccttgcaggcaggggcttgtatgggctttgctcacttccttgtggcgggtgcagggtatttagaggtgaaaggctggagttgagggtcagtcatggaggcgcctaacatcaggcgtagtgcttgtgaggtccctgtcagggtcagcagagcgtcatgggcagtggtgcactgggctggcagccgcgctgtacactccatcttagtccgccagtccctgtgggagggaaagcagcgtagttaaaccaggtgccctccaggtactgggctttgtggatctcacctcacctccatctctgtgcaaccctaggaggtgggcactaattcccatcatacccaagaggaaactgaggcacaggagggttcagacactagctcagggtcacacagaaaggacgcggtggcacttgactggaaggtccttggactgtggggcccacactccaggctgctgccctggagacctgcagggtccaaggagtcgtgcacctgctggaacccaagttctatggggggcggggaaggagggccgatcacccaggccatccccaacagtatgtgctcacggagcacctcctgtacgccaggccctgctctaggtgatggggacactcaacatcgtgggtgggggttgggggtggggagagaaggataagaactagggggaaatactgaaggtcccgggaggcagcagggagacttgctttgcagaaagagagcagggagggggatcgggaggcggggtagggggtgttaaatagggaggtagggaaggtgtccactgagcagagacctgagggaggtgggggagccctgtggatgtggatgtggatgtctgggaggaagggcattttgagcagaggcaccgaccaaggcgggagctgggagagggagtgcagggctgatgagggcagagagggaccacccaggaggaccctgatggactcagatgatcccaggctccctcccactacaggtatgggcagggatgggaacagggagaccagggaggaggctgctgggatggcccaggggaaaagcagtggcctgggccactggctgtttaattattttattcacgtattttattccacaaatttattttacaagtgttacatgagtgcctaccctgcatcctgtcccgcattgtgctggggacagagcagtgacccacagacccgtgaaggacttggacctgtcatcagacagtgacggcccagagtagtccaggatgggagctgcccaggggactgtggggtcacgcatgagccaaagtcctgaaggacaaataaggatttgctaggcaaagaagaactacgatctggacagacagaatggcatatgttaaggcttggaggtaagagagacaactttgagttgccccaggtggtggagggaatcccacctgcaccccagaatacatcaaggcccctaaatgggaatcctgccttgaaataaaccaagcccatggccaggtgcagtggctcacagctgtaatctcctagcactttgggatgctgaggcaggtggattgcctgagctcaggagttcgagaccagcaacgtggtggaaccctgtctctactaaaatacaaaaaattagctgggcatggtggtgggtgcctgtaatcccagctactgcggaggctgaggcaggagaatcacttgaacctgggaggcgcaggttgcactgagctgagatagtgccactgcactccagcctgggtgacagcgcgactctttgtctccaaaaaataaagaaaaaagaaagaaaccaggcccgtatcctatggcaagtggtttgccgctttgagctagtttcctcctctgtaaagcagggatggtgaatcatatcaaaggcaccggcttgagaaataatacggttaatcatacggagagcttgacatatttcctgataaggagtcaacaaagaatgtccttttaaagttcccaacgccatccccacagtccttattacagttcgtgtttgcacagtgaagttgggagtgtcctgtttgttcagtgtctgcctccccaccagaaggctcattccccaagggcaggggccatgtcctgcgggctctactgatgccagctccagccagcgtgcagattattcatttagcctctggtggttattgagcattcactatgtgcctagagttttgggctctagggacccggtggtaaccaagacctgaaggtcacagtctgggtagacagtaaacaaacagtaaacaagcaggacactccagatagcctggggtgtggcgacagaggtgcctgccttaggctggatgatgcggaaggagagcatttgagctgaaggggacagagctggtgatgccggggccatggaaggacattcaggcggagggactacaaatgtggaggccttggcgtgggaatgagattggagagcttagggacaaaagcaggctgggatggccaggggagaggaaggacagggagagggaggacatgaggtcagtgaggttccagggccaaatcaccacaccaaggtgaggtctttgcttttacctggagtgaggtgcacccagggcagggctcagacctgactcagatggtcacaggtctcctctggttgtaggacaccagtgaagaggctgctggggtgtccaggctggaggtgatggaggctggagcagggagaaatgggtataataaaaataacggatgctgggtgcggtggctcacgcctgtaatcccagaattttgggaggccgaggtgggcggataacctgaggtcaggaaggagttcaagaccagcctggccaacatggtgaaaccctgtctctacaaaaaatgcaaaaattagcggggcatgatggcgggtgcctatgatcccagctactggggaggctggggcggaagaatcgcttgaacctgggaggtggaggttgcagtgagtcgagatcatgccattgcactgcagcctgggcgacagagagagaccccatctcaaaaaaataaaaataatagaaatagagctgggtgcagtggctcacacctgtaataccagcactttggtagtgcccaaggtgggaggatcacttgaggtcaggagtttgagaacagcctgggcaacatagctagaccccatctgtacaaaaattttttaaaaataaaaaagctgataacagtggtgtgtacctgcagtcccagctacccgggaggctgaggcaggaggatcacttaagcccgggagctcgaggctgcagtgagccgtgattgtgccactgcactccagcctgagtgacagagcgagaccctatctctaaaaagaaaataaaaataaataatggaaatagattttgaaatgagagatgaagaaaataaagaaattaagaaagatgcttagggttttagctccgacaactgagtggaaagtcgctgttcaataaatatttgttgtatgaatcagtaagttaattttaaaaataggaggtataggccaggcgcggtggctcacacctgtaatcccagcattttgggaggctgaggtgggcagatcacttgaggtcaggagttcaagaccagcctggccaacatagtgaacccccgtctctactaaaaatacaaaaattagccaggcatggtagtgtgatcctgtaatcccagctactcaggaggttgaagcaggagaatctcttgaacccaggaggcgaaggttacagtgagctgagatcacaccactgcactccagcctaggtgacagagtgagagattccgtcttaaaataaaataaaataaaacagcaggtgtctttgagagctcgctatgtgccatgctctgttagaattactttacatgggctgggcacggtggttcatgcctgtaatcccagcattttgggaggctgaggccagaggatcacttgaggccaggattttgagaccagcttgggcaacttaggaagaccccgtctcaaaaaaaattaaagtaggctgggcacggtggctcccacctgtaatcccagcacttgggaggccaaggtgggcagatcatgaggtcaagagtttgagaccagcccagccaacatggttaaaccccatctactaaaaatataaaagctagccatgtgtggtggcaggaacctgtagtcccagctacttgggaggctaaggcaggagaatcagttgaacccaggaggcagagtttgcagtgagccgagatcatgccactgactccagcctgggcaacagagcaagactctgtcacaaaaaataaataaataaaataaagtaagataaaggaagtgctttacatgtcctgatttgtttaagccccaaaacaactggatgaggacatgtatttatcatccctggattactgatgaagtaaccgtagcacagagacgttaaggagcatgttctgagtgtcactgctgggaagagaaacaggatggctgggtggatgggtgtgtattcggggatcaatgggtgggcctctgaaaataggcctgtccccgaatcccagcctgttttttccagttaacacttctcttcctcttcctgcccccagcaccacaccccactctggccggagcacgccaagcagctccccatcgctccggaaacggctgcagctcctgcccccaagccggcccccacctgagccagaaccaggcaccatggtggagaagggatcagatagctcctcagagaagggtggggtgcctgggacccccagcacccagagcctaggcagccggaacttcatccgcaacagcaaggttggtgcaagcccaggtggggtggggagagggctagtgggggctggccggtgatctaggggctcatcctgactcctctccttttctttgcagaagatgcagagctggtacagtgtaagtgtctgggcaaggggcttgctggagggctgggaggaccgggtgctgggccaggagccccaggctgcaacagtcaaggagtgcgtgctgagatggagtgggtgcagacctagggtcacgttctatgctattatttatgtgctgtgtgaccttgggtgagttacttaacctctctgggcctctctctgtccttgagaaacagccccaccttacaaggctgaagggaacattgaatgagtcagtgatgctggtgggtgcttggtacggggcccggcttacataagaaatctgtaaatggcagctgtcattgtggctactggtgtgttgtgtgcgttggaatctgtcagggacttaagagactgagggggttccaggagctttgtggggcagcattgggagtgtgaacccccatccaggttctcacctctcaaacttcctcagatgctgagccccacttataagcagcgtaatgaggacttccggaaactgttcagcaaactccccgaagcagaacgcctcattgtgggtgagtcccggacccccagtcccagctcctagcccagccctgtgactctccgccagcccgcgggcgccggctgagcctcgtgacttgggtgtcctcctgtctctccccgcccctctcagattactcctgcgccctgcagcgtgagatcctgctccagggccgcctctacctctctgagaactggatctgcttctacagcaacatcttccgctgggagaccacggtgagcccgcagcggggcagggtacaggggcgggggcccccatggccaggccccaccccgctcctattgaccctcctgctgtcctcagatctccatccagctgaaggaagtgacatgtctgaagaaggaaaagacggccaagctgatccccaacgccatccagatctgcacggagagcgagaaggtgacggaggacccggtgacgggaccacgcggtcccccgctcagcaggccgcctcccccaaacatgcaaagccccatttgttctgcaccctgagttctctccgagctgtccccttctctctgttctcccggcccaggcgcccatcacccctgacctgatccccgcaccagcctctcctctctttccctgcaacctgttacctcacacagctgctcaggaacagcagaaatagtaaaactcttccatgtatgtggcacctcagccgcccctcccttcgtaagtctccccgatgttgtgtcctgtccctgtcattgtggcctcatgtccgttggttgcaagatggctttctcaccagcggtccaacaagaagggggacaggtgtgggggacacttcccagcagacttctctttgtgttttgttggttaaaagtggatctggccaggtgtagtggctcatgcctgtaaccctagcattttggggaggctgaggcaggaagattgcttgagcccaggaggttgaggctagcctgggcaacatagtgagaccctgtctcttaaaaagcaaaaaattaaccaggtgtggtggcacgcacctgtagtcccagctactcactcaggaggctgagacaggaggatggcttgagcccaggaggttgaggctgcagtgagccgtgatcatgccactgcactccagcctgggtgacaaagccagaccctgtctcaaaaaaaaaaaaaaaaaaaggatcaactgaccattcttagtggcaaaggaggctgggcaagttccctgggctccccccatcacatcccagcccctctgggctgaccctgtctagagatgcatctgtcccctccttggactgggagctccaaggacagggccaggggtcgtctccccatcccagtgattctggaattgtccagggcagggccgggcgcaggacagacgttttgtggaactaatgcaggggtgaattagtggattcatggggccaaagatgtggcgtcagcgcagatgagggtggcgcttccccacctctgtcctggtcgctccccaacctgctcacacctctctctctctctctccctgacagcatttcttcacttcctttggggcccgtgaccgctgcttcctcctcatcttccgcctctggcagaatgcactgcttgaaaaggtgggcctgggtgaggcccgggtggggatggggggtttccagggggaccatggagccagggaccccagaacttgcggagctggaggcagccctggctcttctccatgggcaccaggcccagtgcccctgcagctcctccctgggccccacctgaccccgaagctgagtctctggcaaagggacatgaattggtgtaaaccgtcgtaattcttccctggggctgggaatgattttcaccctgaaggacatccaggttccactggcagcgggggagtgtggatagaggctgggaggtcatcacaggatgccggctatggctggtccacagcacctcagagagccccagccccatcctccggctgagcggcactcacgcgctgccttctcagaggctccgatgtccctggagcaggcaggagtgctgagggtcccattcagcatcctgagagagggacagcgcacagtcaggccctaaggaggacagggcagagccccgggattccagccccatcccctggggcaagtgattgaaccccatctgtcaaatgggggccatccccacttcacagcacccagaattttgcccagaataagtactcagtcatgtcagctcttatgagcagagtagcccagcggttagctccctcgccaccccctctgccccccggctgtagaccagctcccctggggtcacatctcagcactgctacttcctggctggaccccagcatgtcaccttgcacttctcagcaccattgtcttaaaaggatgatgaggttagcacctactttccagatggttttgaagatacagtgagttagtacatctgtaaagtggttagaagaatgcacctagttgaccaggtggcaaatgtctgctgctatcatcacttactgttaactgtcatcactgtcattcagccactctggccatgggtggctgaaagctcaaggctcccgaggacacctgggaaaagattcggggggccacgatggcataggcatgggagactcagccctggagtctggcagggcttgaccaagtcacttggtgaccttgaacacatgactttccctacatgacttccccttcctgggactccgtatgctctgtaaagatgggaacattcatggctgggcacggtggctcatgcctgtaatcccagcactttggtagacgaagacgggcggatcgtggtgcccacgaggtcaggagttcgagaccagcctggccaacatggtgaaaccccgtctctactaaaattgcaaaaattagctgggcgtggtagcacgcacctgtaatcccagctccttgggaagctgaggtaggagaatcgcttgaacccaggagggagaggttgcagtgagctgagatcacaccactgcactccagcctgagcgacagagccagactccatctccaaaaaacaaacaaaaaaagatataaaaaaaatgggaacattctctggccagagtattgtggggacttgggaagcaggaagtttgagtcctgggcgcaggccctggaggggctgtagcaggggattccccgcttgctgaggccaggtctggtgcgggagatcgtggctgcctccttgtggaagccaggggaactgcggaggccgagggctggtggggaatctggcgggccgggctctggctggggtgagatggaggccaaccccaggtcccgcctccccagacgctgagtccccgcgagctctggcacctggtgcatcagtgctacggctcagagctgggcctcaccagtgaggatgaggactatgtctcccccttgcagctgaacggtctggggtgagttggaggtcaaaggaggttgaagggttcgggggagaacaggacggtcggcgtgcagagttcctggagtgctggggggcctgagatggttgtatgacgtctggaggattcaggagggtgtatggggtctcaaggacacagcagtcccgcttcctcccctttcccacaggacccccaaggaagtgggagatgtgatcgccctgagcgacatcacctcctcgggggcagctgaccgcagccaggagccaagcccagtgggttcgcgccgtggccatgtcacgcccaacctttcccgagccagcagcgacgcagaccatggggtgagcggtgggttggaagaggggtgggatactgataggaagagagaggagggctgggggtgcagtgggagaagaacagcctgacagatttggaggggaatggatagggggacaggggaggcctggatggaggaacaggacagggaggggaagacggacatgtgacagggaaagagagacagggaagagaggggacagacagaaaggatgagagacagaagggatgggagatgggtggatagatgaagcagcagacagacagacggacaggacaggtaagaaagcttatggctcaggcatctgagacaagcctggcaggggctgagaggggccctcatctgggtggccccaggctgctcgcagctcagccgtgagccctcggtgcacacaccaccccgggtctgcacaggctctggaatccttgtggccagtgtggacttgggagccctggggctgggatggaggtggccaaggctgcatcgggcctttctccacaggcagaggaggacaaggaggagcaggtagacagccagccagacgcctcctccagccagacagtgaccccggtggctgaacccccgagcacagagcccacccagcctgacgggcccaccaccctgggccccttggatctgctgcccagtgaggagctattgacagacacaagtaactcctcttcatccactggggaggaaggtgaggcaggcgggcccaattcattcgcctccggtacttgcaagcctcgctcagtcttaagcaagaggggatggattcgcccgcagcactgagaatccaggggcaggcgggatggcgttcaggcgctgttgctagaaatctctgtctttactctgttttgaaggcagcatggcagggtgaacacaagcacagactgaaggcagcttgccgcggttcacatcctggtcacaccacttcctgaccatgtcacgtgggcaaattatgtaacttctctgagcttgctttcctcctctgaaaatggggttaacaatgataatacccacttcataggattgttgttaagagactataaatgaggctgggtgtgatggctcacacctgtaatcccagcactttgggaggccaaggtaggaaggattgctagaggccaagagttggagaacagcctgggcagcaaagcaagaccccgttttgtacaaaaaagaaaaaaaagaaaaaactaggtgtggtggtgcacacctatagtaccagctacttggcagaccaaggcaagaggatcacatgaggccaagagtttgagacaagcctgggcaacatagtgagacccctgtctttacaaaaaatttaaaaattagccaggcatggggtcatgcaccctatgtagtctcagctactggggaggctgaggcaggaggatcgcttgagcccaggagttggaggctgcagtgagctatgattgcaccactgcacttcggcctgagcaacagagcgagaccctgtctctaaaacgaacaaagggagagaattaagtgatttcatacatttaaagcacttgggccagttagtaagcattgactattagtatttctattatcattattgtattcattttctctctccactaattttcagctagcctctattcttgtctcttatggggcagagatggcctcagccctgccccagaccagcccaatgagagagagcagcctatttttcctagtgtctacagcggacaccctagggttggctctgattgggccaacttgagagtgtgcctgcccctgaaccaatcactgtggttgatcggatagacctgggccacccactcacccctgaaccaattgctgtgcccctaggttgatgctcccaggaggcgtgctatctggtaatgaatccctgtgatttaaatctcagggcctaggtgtgttctccacccagaaccaagcacagtggctgtctgtctgggcctggagcacgtgcccaccctcaacccatccctgagtcacaggagggctctgtgtcagtgtccagctgtgctccaggaggtggggtccgcccatgcacactacaaggcctgggagtggggaggcgtggcccgcagagggagggaggagtggaggcagtcatcatcctcggctctcctctgtctccagcggacttggctgccctgcttcccgacctctccggccgcctcctcatcaactctgtcttccatgtgggcgctgagcggctccagcagatgctcttctcggactcgcccttcctccagggcttcctacagcagtgcaagttcacaggtcagcgggcgcatgaaggagaggctgaggttacccaggtgcaggggaggggtgaggaagggtagcccaggacaggggaaggcactgctagccagtggggcaaggcgaggtggtgaaaagcaatgtctgtcagaccagaagcagctctgccacttactagctgggtaggcttgggcagagttctgagatgctctgtgcctcagtttctccttctgtataatgggggtatgataatagtacctggcttattggttatcatgagaactaagtgagttcatactagaaaagttcctagagcaataccatatagtaagcgtttaataaatacaagttaagaggctgaggcggggctggtgcggtggttcacacctgtaatcccagcactttgggaggccgaggtgggcagatcactagaggtcaggagtgtgagaccagccagggcaacatggtgaaacctcatctctactaaaaatacaaaaatcagctaggtgtggtggcacacacctatagtcccagctacttgggaggctgaagtgggagaattgcttgaacctcggaggcggaggttgcagtgagctgagatcacactgcactccagcctgggtgacacagccaaactctgtctcaaaaaaacaggggcggggggtggggtgctgggcacagtggctcacgcttataatcccagcgctttgggaggccgaggcaggtggatcacctgaggtcaggagtttgagaccagcctggccaacatggtgaaaccccatctccactaaaaatacaaaaatattttagccaggcatggtggcgagcacctgtaatcccagctactcaggaggctaaggcaggagaatcacttgaactcgggaagcagaggttgcagtgagccaagatcgtgccgttgcgctccagcctgggcgacagagcgagactctgtctcaaaaaaaaaaaaaaaaaaggtgggaggagggccaaggtgggaagttcatgtcagcccagaagttggagaccagcctgggcaacataatgagactcagtctttacaaaaataaaaaaaaaaattagctgagcatgatgctgcccacccgtaatcccagctactctggaggctcaggtgagagaattgcttgaacccaggaggtggaggttgcagtgagccaagatcatgccactgcacctcagcctgggtgacagagagagactccattaaaaaaaaaaatgctcctgaggcctccccagaagccgagcagatgtcggcatcatgcttcctatacagcctgtggaactgtgaacccattaaacctcttttctttataagttactgagcctcaggtatttatagtaatgtaagaatggcctaatacagagctcctcagcctgacacgccagcccttttaggacataagcatagttttgggggccttgtagccccccaacacaaggcaccatcttcctgactgcaggggatactgcatgtctcatcaatacagaaaaagaaacaaagagaaactcccatctgacacgctcctcccctgcttgaatctcttttgtagcctcccaagttccttggctggtcccatgtcaacccttcagcctcacccagagctgtggctgcccctctccatacctggctgccccatcccagcctcaggggacttctctcaatattggcctccagcctcagggcctttactggtatcacgcggcctcctgggctcctctgccccgaccccttccttcctcagttcctccttcaggccttggttttgatttcacatcctcctggcagccttcccttaccttcctcagatcccagatacccccagatactcacagcttctgcccttaactcacaccatgccagtagtgtgtggtttttatttatagatatttcctgttgttctcaagagattctgggtgctaaggacaggagttcatctatcctggtctcccactggcctccaagccctgcataggcctgacagagtggacattaaatttgtgatcattaacacatatttatttatttatttatttatttttgagtcaggttcttgctgtcgccccagctggaatgcagtggcacagtcttgagtcactgtagcctctgccttctgggtttaagccattctcctgcctcagcctcctgagtagccgggattataggcgcccaccgtcacgcccagctaatttttgtatttttagtagagacggggtttcaccgtgttggccaggctggtttcaaactcttgacctcaggtgatcctcctgcctcggcctcccaaatttcccgaagtgctgggattacaggcgtgagccactgtgcccggctgcctcagggagcttttgatcatgctgaaaggcaaagggggagcaagtgagagagagtggaggggaggtgccacacacttaaatgaccagatctcggaagaactcactatcatgaagacagcagcaaaccatgagggatccgcccccatgatccaaacacctctcaccaggccctacctccggcattggggattacaattcaacatgagatttgggtggggacaaatatccaaactataccaaactcagactctgttctaggggtactggggagccatggagtgttctaggcagagaagggatagagtcaggcttggctttaacaagatgcccctggaccagatggggagactgaggccagacactcaagggaaggctggcaggggcactgggcaggcaaagatgggctgaaccaggagtgacgctcaggaggtttggtgaacacacagtgtaggtaaccatctaggggtttgagtagggggtgtccagggcaaggcctaccgctccagtgggagcctggaggaccctgggccacccctgagtgggggcctgggagatgcagcaggtttggggagatgctgaggctgtgtggagctcggtgggttcgaggggtccagggaccttccaggggaaggtgttcaaaagattacaggtccaatgctcagggcagaagccaagacgggtgcagagggggaaactgaggctgcagcagtggaggagatggccctgccccaacagctaaggttttaggctcctggaaggaaggtggggacacagaggagtggtggggattgggacaggtccccagagagacctcccagaaggctgagtctcctgtggcctgtgggcaaaggactggggtgtggcctcctcatgctgctcctccctcctctagacgtgacgctgagcccctggagtggggacagcaagtgccaccagcgccgggtgctgacgtacaccatccccatcagcaacccactgggccccaagagcgcctccgtggtggagacacaggtgggccaggtggggcagccgagtgggtggggcagctgggtgagtggggtggccctgacttctccggctctgtccctgcagacgctgttccggcgcggcccccaggccggcgggtgtgtggtggactccgaggtgctgacgcagggcatcccctaccaggactacttctacactgcccaccgctactgcatcctgggtctggcccggaacaaggcgcggctccggtgagtggtggctgggcccctccacccgatgccctggtggccccagggcctcctgtccactcctcaagtcagcagcagagccttggttcccaccctggtggaggaacagaagcgtggggttcctgaggcccttgtcctccgaatagtggagggtagaggaagagtggccctgggatggctcctcccatctacagagggtgtttgagcctcaagactctgaggatacagcaaagccaggcaatatcacctctctcagggagctcatattctagtggggaattggacaatagagaaatgatcaggaaaatctgcagaacattcactggcagttaggcctatggagaaaaatgaggaaaacacggcaggctaaagaagcagggtgtggaggcttttacacccgacacgctggtcagggaagggcctactgggaaagaaatgtttcaccaagaacctgaaggagctgagagcaactcatttgggacagcaggtgcaaaggccctgaggcaggggtgtgggcaatggctggagtggagtaagattgagtgagtaggagctgagattaaagtggtgaaccggggcccggcacagtggctcacacctgtaatcccagcactttgggaggctgaggcaggagtatcacttgagcccaggagttcaagagtagcctgggtaacgtacggaagccctgtctctacaaaaacaattttttttaaattagccagggtccaggtgcagtggcttacgcctgtaatcccagcaatttgggaggctgaggtgggcggatcacttgaggtcaggggttcgagaccagcctggccaacatggtgaaacccatctctactaaaaatacaaaaattagtcgggggtagtgatgcacgtctgtaatccctactacttgggaggctaaggcacaagaatcacttgaacctaggaggtggaggttgcagtgagccgagatcgggccactgcacttcagcctgggtgacagagtgaaactctgtctcaaacaaacaaacaaacaaacaaaaaacaagttaaaaaattagccagacatggtggagatttcagtgagccatgatcacaccgttgcacttcagcctgggcgacagagcaagaccctgtctcaaaaaaaaaaaaaaaaaaaaaaaggtgaaccagatgtggctcatggtgaagacttgactttacctggagtgaggtgcaaccaggccagggctctgagccaggagggcgctgacctgactcaggtggtcccaggctccttctggctccctctgttctggtgggaacagactgcaaagacaggtacaggagcagggaggccagggaggaggctgctgggacatccaggctggaggggacggaggctgaatcagggtgaggaaatggagggggaagagtttagattctggagagattttgcaggtttagctgacaggatttgctgagagattggatgtggcggtgagggaaagagagctcaaggaatatcccgaggcatttggcccaaatcactacaacttcggagctgcccttgacccagatgggggcggcagggaggaatgggtttggggaaagaccaggaggtcagtttgggactcagctgtctatgttgagctgagcccatgtggagctggggtgcagcagccgaatggaagaggttcaggggcatggtctggttaagacgtcagtctgtgagtagacagggctcaggccgccgggagcgttgcccaggtagtgggcatgggtggagaaggaccgagggctgagttggctggcatttgggctgggcgggtggtgtatggggtatccagggaagccatggggggtagggaacccatctgttttgtctgtgagtgacaaggggccctctctgaattaggggaaggaaaaaactcagcttgtgggacggggcagccagggctggagtcagacccttacctccttcccctgatctcccaaccccagagtgtcttctgagatccgctaccgaaagcagccgtggagcctggtgaagtcgctcattgagaagaactcgtggagcggcattgaagactatttccaccatctgggtagggacagaaggccggctggggcgtgggttgggggatggcctggccaggtatggacatccagagccccctctcttttacgcagagcgagagctcgccaaggctgagaagctgtctctggaggaaggcgggaaggatgcccggggcttgctatccggcctgcggcggcggaagcggcccctgagctggcgggctcacggggacgggccccagcacccagatcctgacccctgtgcccgggccggcattcacacctcgggtacgttccgttggggccgggttggggtaggcggaggatcgggggtcctggactgggccatctgactccaagctgctctcctgcaggctccctcagctcccgcttctccgaaccatctgtggaccagggccccggggcaggcatccccagtgccctggttctcatcagcattgtgtgagtaagagacaggagcagtggccacacaggcctgaacctgcctcctggctgtgtgaccttgggcaagtgtgtggcctctttgagctctctgcttaagtgggagcgtgggtttgctcacagcaaggattagacaaggcaatgtttgggatgtgccggtttgtcatggagaagccttccctgctagaacagcagagccggggggggctatgggagatcagaggggcctgacctcacccaaggatcaaggggggctttctggaggagcaggcacacaaagattctggaattaggtgcacagggagaggtgtgcctaacaagtgaggtcatttatggacattatgttctctgtgcccactcctaagctgggcgatgctgaggacaccgcagtgaccttgaggaaaagatagacctcacaccagaccagagtgatccgggctgggatgggggaggtatgggcagaggggttggggctgggagtggggaagccctgggaggccagcggcggcttcctcccaggccagagggggcagtcaggatgggcgtcctgagagagtggagaccgcgtaggctaagggcttgggcagggagaacccacactcctgcccagaagcctgcaggagttggcgggcaggacgctgggaggaaacagaagcaggatcccggggttgagcagaccctgcgaggtgagggtcaggccagctacatgctcagcctctgagcctcagctctcagctctcatccagtgagggggcgtggtgctctcagccaagagctgccccgggtgaggagggctgggggtgtcgggggcaggccaggcggcgctcatctctctgtctcccctcactgctgctgctgcaggatctgtgtgaggtagggtcccgagtcctccccctgccctcccctccctgcaccccacccctgctgcagcctcttctccccaccccatgccccccagctcccccagggaggtggcctggcatggcagtcaagggtatgggcatcagacagacctgggtttgaacactgacttccctgctatggactgtgcaaccctaggcatgtctctcatcctctctgagcctaattctcctcctctgcaatgggggatagaggtgtccctacaagatgtagttgtttgggggtgttcagagcatctagaccccaggaatcctgacctctgacccctgtccccagccttatcatcctcatcgccctcaacgtcctgctcttctaccgcctctggtccctggaaaggacagcccacacctttgagtcctggcacagcctggccctggccaaggggtgagtgggtagcctggggaaatgggggggcttgggcacatcgggggaggccaaggccctgctcaggcctggcatccccacagcaagttcccccagacggccacagagtgggccgagatcctggcgctgcagaagcaattccacagcgtggaggtgcacaagtggaggcagatcctgcgggcctccgtggagctcctggatgaggtaggaggcgccgctcgggcagggctcggggctgcggggctgcagggtcctgtgttgaaaccccaccgtgcggcaggcacttcccctctccggatctcagtgtcctcctctgtaaaatgaggaagccgctcagagtccccaccccacagcattgcaggggaaagcatggaagcatggatggaagacagaactgattggctcacgtcctggagaaaagtccagaggcgtctcacattaggcacggccgggtttggtcactcaatggcagtaagagtcagtctctcgtgcccactctgccctgtgcccatctccagggttggcttcattggaggccacccttttccccccacaggggaccacggagcttactctcattggctgctggggtcccaggcctacccctgacacatcacaacagccagggcaggccacgtgtggtccctctacccgctaccccactctggggtaactaaggggtcacatggtctgaaggggagagactctccaaaggacctgaggtctcatctccaaaacggagtggacccagacacccagtgtagttcagggacaatgtctactcagacaaccaggttccaattccggtgtgtgacctcgtgcaagtgattttgccatggtggccgtggactcctctgtgcacaggataatgactgatgctacctcaaagactgttgtgaggatgagacaagttgacattgggagtggtgccaggcctgcaggaaacactggatgtgggctggctgtcctgagtttgagcctagtgccagggacaaagcagatgcccaataaatgtgatgtcatcacacgacaattccctcaggccccagtagactcaggccagcagttgcggtgggtcagagcaagtgtcaggccagcagttgcggtgggtcagagcaagtgtcaggccagcagttgtggtgggtcagagcaagtgttaggcactcggggaaggtgtcgagggggaaagcggatgggaaacagagtctggcattgcctgcatttccaaggccatcagagctgaagttgtgggtgacggtgaaaatcttgtctcattggacccttccatatcagaaggctcatctttaggggtctcattgccccccgaaatcaagcttgggagaggctcacactggaaagggcggggcaggatggggtggggaggagatgaaggctgaggccccatcactcatagagagggtaggcagggccccccatcctgcgttattttattttattcttttgagacaggatctcattctgttgcccaggctggagtgcagtggcacgatcatggctcatcgctgcctcgaactcctgactcaagtgatcctcctgcctcagcatcctgagtagctgggactataggcaggcaccaccacacctggccaattttaaaattttttgtagagaccagagtctcaccatgttgcccaggctggtctcaaactcctggcctcaggcaatcctcccgcctcggcctcccaaagtcctgggattgcaggtgtgatccaccacgcctggccctgagttaaatttttatcattttcctctctgtcaaactgctaagggtgcagagttgacgtcacagattggtgctcacagtagatgtagactgagcacttacctgcagctgggctgttctaggttttaagcatgactgctttatccccacagccagcctttgagaagatgctcttgttatcccagtttttttgagacagtctcgatctgtcacccaggctggcgtgcagtggtgcgacctctgccttccaggttaaagcgattctcgtgcctcagcttcccaggtagctgggattacaggcacccgccaccacgcctggctaatttttgtatttttagtagagacgggctttcaccatgttggccaggctggtcttgaactcctgaccttaagtgatccaccggtctcagcctcccaaagtgctgagattacacgcatgaggcactgtgcccggccgttatcccggttttatacataggtaggcgatatgaggcatccagaggttcgaggagctcaggagcttgcccgaggtcacagagtgggtaatggtgacagctaacatgtgctgagcacttagtgtacaccaggttctcagtgctcttcagaaccctgaaataatcctgtggagcagatgtgttatagacccgtatttcaaatgaggggattttggctcagggtggttacgggacttgcctgaggttaactgaggtaacaagcagcagagccaggatttgaacctaggccatcggggtcacaggcacacactaagccccttcctctgctgcctctgagaagttaaactgggtgcagcatggctgtgctcttttcaccaagggaccctggggtggggcagtatggcctctagaccgtcctcagtttctcaatggcaaggtgggggtgggcgacatcaccccccagcctccagcgttcacccccgaccctgctcacctcctccccgcagatgaagttctcgctggagaagctgcaccaaggcatcacagtctcagaccctccctttgacacccagccccggcccgatgacagcttttcctgaggaccccggccacgcagctgttcccccacatggacagatggacacacagagcctcggcggccactgctggcacggtgtgagcgccaggcatctcccacccgcccctcccgacggcccaaccaggggctgtgcagacgtggggaccacggaaccgagatgcactttagaccagggagctggcccggcctctggcaggccccccactaacttattttgcccggctgaggttgtggggggcgcctcctggggtgcacgattccctcagctctgggtttaatgtattatatttatttggggccgacagtgccccaataaagggtcagaagtggctgtggctgtgcctgtggggccctgggagtgggtgggagcctcctgttgcactcagatcctgccatggtggggaggggacctctgtctgtgttctggggccatagtcactgaaacgatctggaattcccgcagcatcttacacaagctttacatcatctgaggtcaacgcaggaactccggggacagaccgtggtagctggagttcaaatcctgcttcctagcagtggtgtaaatgcagcaggtcagccccctggagctccagtgagctttcctgtgcaatgggtagaatggcagtagctgtctctcagggttgttagaaggcagtggttctcaaacttgagctgcattcgaatctcctggagagcttgatgaaaaacagactgtgggcccctccctccaaatttctggttcagtaggtctggggcagggctgggattctgcctttataacgagttcccaggagttgctcatggtgccatcccagacgacactttggttttttgtttgtttgttttaagttagggtctctgtcgcccaggctggagtgcagtggcacaaacatggctcacagcagcttcgacctcctgtgctcaagccatcctcccacctcagccttctgagtagcttggactacaggtgtaagccaccacgcccggctaattttttatttctttttggagatgggatctcactgtgttgcccaggccagtcttgaactcctggcctcaagcgatcctcccgcctcagcttcccaaagtgttgagatttcaggcgtgagccaccacgcccagccccagaccacactttgagaaccactattataggttcaaggagttcataaatgtggctacttataacagggcccggcacagatggaatggagtaagtattcaataaatgttacacttattgcataaaaatagagggaaaaaagtaactcgcgtagtgagtaccaagtacgtacgtacccagctctgtgccaagatctgatgttcattttattctcacagtgattccatgaggtggagacaaagatgtacacgcccgaggctacccagcagggaggcagactccaggcctgacccctggggtctccacatttacatgcaaggtcctaaccccctcaggaccccaccacagcccattcaggctgacgttggttggattcctgttttacagatgaggaaatgagcttggaggcaaagtccctggtccagaaagaacccaggtccacctcacgcaaaccttgtcctggttccagagggagtatgtggggtagagacacctttggcatgtcacacccccggctataagaatcatcctaactgatggcttggagcaggggactggaggagggtttggagagtggatcaggagtggcataggaggcagagccagcctctcctatcctctagttgtgtgatcatggcaaggtacccatgctgagcctcagtcttctatatctgtaatatgggtgtaataataataccacctataggaaaaattaaatgagctaatgttagtaaagtgcttagaatgcttagaacagcaccaagcccatacatagtaggtgctcactgaacatagcttatagggccgtgaggtgcctcctgtccagtgctgaggcctgtcctcactgtgccttcacctaccatcccccaccagtggaagggcccggaacagcaagagggttattctctgcaggggaatttcacagctcagaaggtgctggcgtaaaagtctagaccacagaggtgtcggatgtccctggctccctgcccctctgccatggtcctgccccacaccctggctcctcttgcctggcagggctgggccagggggattctgagaccttaccccacccggaattggaggctaggatctgggtagtgacccttcagccgagagtctcactcccaccctggtcctgacagcccagaactcccatctccattctctcaatttggcagaacctactggtaggacaggccactcaccactgctggggcaggattccacatccatcctaggccagctacatgactctgggcaggggcacggccctctcccagcctcagtttcttcatctgtaaaatggggataatagaacttgctgaaggtttggggcagtagaagtgggttctgcaaatcccaaggacttagtgaacattggcattcatttatttgtttgacaaatattgattgagtacctacaatgtgccaggaacagttcaaggtgcaagagacacaagacaatatcctcacctgggagattttttttttttttttttttttttttttttacatggagtctcactctgtcaccaggctggagtgcagtggtgtgatctcggctcattgccacctctgcctcccgggttcaagcgattctcctgcctcagcctcctgagtagctgggactacaggcatgtgcccccacgcccagctaatttttgtatttttagtagagatggggtttcaccatgttggccaggatggtctcgatctcttgacctcgtgatccgcccacctcggcctcccagaatgctggaattacaagcgtgagccactgcgcccggcctttttttttgagacggagtttcgctcttgttgcccaggctggagtgcagtgatgcgatcttggctcactgcaacctctgcctcccgggttcaagcgattcttcctcagcctcccaagtaactgggattacaggtgcccaccaccactcccagctaattttttttgtattgttagtagagacggggtttcaccatgctcgtcaggctggtctcgaactcctgtcctcaggtgatctgccccccttggcctcccaaagtgctgggatagcggggggcggctcacatctgtaatcccagcatggtcaacatggtgaaaccctgtctctactaaaaaataaaaaaattagccaggcatgatggtgcacacctgtactcccagctacttgggaggttgcggcaggataatcgcttgaacccgggaggcggaggttgcagtgagacgagatcagccactgcactccagcctgggcaacagagccagaccctatctcaaaaaaaaaaaaaaaaaaaaaaaaaaaaaaagaacataatgtcaggtagtgaggctgctgtggaaaacactcaacaagaggtaaagagtaaaggaggtcaggttaggagcggggaaggcagtttaccctgaagggacacagaagacctgacgaaggtgacattggagccatggaggcccacggagaggggcggggcagggggggagagccggggcagaggggagagctggggccaaggccctgaggcaggaacgggttccctgtgttgggaacagcaggagggcctgaacagccagagtggagtgggaggaaagaggggtagaaggtgacatcagggacataaatgggtgcaggggatcacgaaggggtcctcctcctgaaacagcacctccagattcccggggctgcttctctccagggtgccccgcctgcttgggtgaggtccggattgtagctgtagtcctagcctgacggccccccaccctcctctaatgcctacttggggtccctgcacattgacccccaggcctggatatcagggctcaggggagataacttggaggttcgccctctggaactcctgaggatgacctccatcatttgaagtcggaaacccggcccccaaactgcgctctaagtcctcctgtgactctgggggtgacctttccagactccctgggaaggtgggggggggggggtggtcctcagagccccagcggggtcggagacacacagaccaccctccccgttcccagaagtcgcggtccctgcgccacccggagaggccggtgcagcgggcgcctcccgggccgctgcggcaaaggctgggcggccgcgccttccccccgcggtgattcatcccgccccctccctctcctccctcgtccctccctaggccgccgccgccgccgccgccgccgccgctgcagtgcgcaggagaccgcggtccgcgcccgagcgcgcccgagccggagcgggaccggggtcggtgcacctagcggatgtgcccggctgcgcgcgccagcgcagcagcccgagcagcggccgccgcccgcgcggcggggatgcccggacgccgggccccggggctgggcccccggcggtaaccggagcgggggggccgcgccccccctcctcccccctcgccggtcccagagccgcagctgctgcgcccgcgcgctcccggggacattctaaccgccgccaggtcccgccgcctctcgccccgctattaataccggcggcccgggaggggggcgcagcacgcgccgcgcagccatggggaggctgctggccttagtggtcggcgcggcactgggtgagtgcgcggggggcgcgcgcggccggggggcaccgcgggggcactggcggggcggcgggagtggcgctcgggacacggggcagccgcgcgagggccacccccggcccatccccgggccccgccaagtcagcttcagaagttgtgcgcgcgggagccgggcttggggagggcagtggaggtgagggtgggctccagcgggtgggggccgggctggcacagcctggcggctgcaggcgcccagccgggggcgaggaaacgcggagtcagctgctcccggagccccgcaggctgcaatgtgacacccacagccgcgggaggggggtggggggaaggcggcgcccggagactgggacgggaaagacggagggacagggagagatgaagacgggaggaagggggcgagagacagagaaggactcggagcgcaccggagtggtccgctgggatgctggggacatgggggtcaagggggagacggagacagagagaggggtattggagagagagagagagagagagagttaagagactgagcgcgatggagaaagggaaacttgagaaaggcagaaggagatggagagaagagagagggagatgcgggtgcccgtgaacaccgggagagaatcttgcatggagtttgaaaagggatagacgtagaaaggtggaaagagattaggagaggtctccttctgagcccagagagtggacaaaaagtggagggaccttcagagagacccctgagagggacaaagataggagggactgagacagaggccctcagggagtctgaaagggaccgcaggggaggcggatggatgagaagtcctgaggatcaggaaacaaggacagcacagggctgcagcagaagagacacagcgttagctacagagtgctgggaggcagaaaggaggtgccaggtaagagtgtgaaggaattctaagactggaattcagtgggctgcaaaagccctggggcaggagagagctcaggaaagctttgagtagtggatggggttggggtgggaagagctctagaggcgaggagcctggggaagaggggatgatggaggcaggagaggccggggaggggatggctcacacaggggcttgtgggctgtggagaggggctgagtgtgggtcagccccggtttcagtgcccacctccccacaatcccccacccccagaccttttctcccaacccatttctcctggagctagctggttttacaatttaatggtgaaaatgactgccaccttaaacttctaacttagctggaattctcattctaccacctagatgcttgggttcctccagcaagggactttctgaggaaggggcactcgggtagcataaagtctgagttaccggcaacgttgacagtcccacttatggggcctcccatgtacaaggccctacctaatgtatgaaaatgggcccagccattgctggaagcaaaggaccatttctttcaacaagagagagggaaactgagactcagggatgaatgacttgctgaggtcacgcagtgagtgacagggctcagcctagcatccagtcctgtctgctggtaatcattgaggggggaacagatggtttgtgaggggtctggcattgcttagggcaatgggtgcctctgcctgacctgagcctgctgtccccacagtgtcctcagcctgcgggggctgcgtggaggtggactcggagaccgaggccgtgtatgggatgaccttcaaaattctttgcatctcctgcaagcgccgcagcgagaccaacgctgagaccttcaccgagtggaccttccgccagaagggcactgaggagtttgtcaaggtgtgcgggtgccgggaacgggcatgggagggcaggggtccacgagtgggaggcggtggggctggatctcagggagggggcttatttgtttaataatatgctgtgattgctgacctggattcagattctggctccaccagtggccagctggtgaccttggccaagtcagtgagcctctctgaaagtcagtttcctcctcggtaaagacggggtggcggtggtctctagcccataggtttgtgtgaggactgaatgcattgacgcacctggcacacggttggcatgaaataaatgtcagtggacttatttggcaccagcaaacaatgtctctgatagtcattacggagggaagacagaactgttttttttaacctcctttaaactatgtgtgtattttgcattatatatcggtgagggaaccataaaattctgtgacgtgctggagagttggggtctccagctgctggaatcaggctgccctgtctctgctggaggagtgtgtctggtggctgggaaagaacggcagagaatgatagcctagaggccagatggggcttgggaggatgactgaggaacgtgtgtgtgctcgtgtgcatcttggctagaggcaaaagcggggtctggttgactccaggcgtgatcctagccccccacccctgtgccctccctgcctgaggtcaaggtgtctgagcccatctgtgtgccatctgtgtttgtgggtgtcagggcaggggacagaatcagggtcaggtaagggaagagaggcccaggcagtgacaccttcccctccctggctacccctagatcctgcgctatgagaatgaggtgttgcagctggaggaggatgagcgcttcgagggccgcgtggtgtggaatggcagccggggcaccaaagacctgcaggatctgtctatcttcatcaccaatgtcacctacaaccactcgggcgactacgagtgccacgtctaccgcctgctcttcttcgaaaactacgagcacaacaccagcgtcgtcaagaagatccacattgaggtagtggacaaaggtgagtcgggtgctgcctgcccctttaccgtcacccaccggagagccagatggagggacagatggcaggcagtggacaggacaggctggctctgtgcctggccagccaaccgcccacagcagcgggctgagggggaggggagcagcccctcctgcccactccagctctggcctctgtttctctccagcccacggagaggtcaaagcatgcctgtcccccacagacgctccgggtacagaacccagctctgtcacctgtgctgtatgacctctggcaggtgccttctgtctctgagccaaagggttgtcctgggcttgcccgggataataatccgatgtgtttctcggggtgtggtttgagccattcttccatcatggggttcatgaggattgagcagctgcaggcacacgcctggcttccagcagagccttgcaggtggtggcgagggtggcggttcttactgttcgagtagctcagccctgctgccctctgtggtgatgaggcaagagagcgtgccacctagagcagagttccgcacacccctctgcactcctgccccgggggagccgcgctggcctgcagtctcactcaacacctctggggcgggcctaggggtcctttctaaagctctcaggtgaggcagtgaagggccacaggtgcggggcccaccctctgagcagcaagggcctacagcgcttttgaacgtctcatcattttgcctcagccaccctggaccccttttctgagggaggtccgccccttctctgatccatcttctgctcagcatcaattgcaattgtccagcgccctgtggccactggcttagagttggggaaacagcccaggccttgaagcagctacaagccgtggcagaaaggtctctcagggccacggcacacacatcctcatgggcaacacgcactgcccatcttttctgtgagatgggtgccggcctcagtgccttacacggagtcccttagtgaatcctctccccaccctctggggtaggggctcttcctatccccattttacggatgagaaaaccaaggctcagggagggaaggttatgtggccaaggtcatgtgattgggagctggacttgaatccagaggagcttgggtgactgtgtttctgttcttggcatgattcactgtactctgtgatcagccagagcctgtgggtttctttttataattagcatttttacgtttattgtcaaattggtgtagcagaatgcaattcagcaggcatgtctgagccactctggtgtttgtcacgatgctggggggtgggggtcacccgcagacatggatgatggagccccgcctgcggagttgctgtgacaaagatgcctgcggtactgggactttacaaaacctgtgttattgctcttgcaaatctgcagaggtgagatggggagagggtgggaggctccagggcactgttcagccacccaggttctttccatcttgttgtttggcagttggccagggtgttgtgtcctctgtacgccgtgacccaatagagcctctttttttttttttttaaatttagatttttattttttgagacggagttttgctattattgcccaggctggagtgcaatggcgtgatctcggcccactgcaacctctgcctcccaggttcaagtgattctcctgcttcagcctcccgagtagctgggattacaggcatgtgccaccaagcccagctaatttttgtatttttagtagatatggagtttccccacattggccaggctggtctcgaactcctgaccttaggtaatgatccacctgccttggcctcccaaggtgctgggattacaggtgtgagccactgcgcctggcctgagcctctcttttttaggattgcccactgtatgacactacatcccacagcctgtgctattaccagcatttaccatcatatgcagttccttatgttggccctgcagagtttgtgttttctgcactatccacccagttctagtgttttttacccaccatatgtagtattgccttttaaacattacccactatattatagtattttatattacccactataggatattttatattacacaatatattttactatcataatattgccaaacacaacagttttttgttttttgttaaagagaccaagtcttgctctgttgcccaggctgggatactgtggcgtgatcatagcccactgcagcctcgaactcccgaaatccagcgatccttctgcttgagcctcccacgtagctgggactacaggtgtgagccactacgcccggcaattttttttttttttgtagagactggatcttgctatgttgcccaggatggtcttgaactcctggcctcaaataatcttccctccttagccgccgtaagtgccgagattacaggagagagcctccgcgcctggcctacagtatttttattataatccatcatactagcgtatttttaacgttccccaccatggcgggtatttttattacccaccatgctatgctatagtatttcaaaaattaatcctattgtagcatgtaaaaatattccattctataccatactatattcatcattacctctgatactacagtatttttaacatgactcattgtgctattgtattttttcattacccacaataccacaatattactgtatttgttagcactgcctgccattccttattattattatttttgcaatggagtctcgctctgtcacccaggcaggctggagtgcagcagtacaatgtcggctcactgcacctcccgggctcaagcgattcttctgcctcagcctcccaagtaggtgggattacaggtgcacgccaccatgcccaactaatttttgtacttgtagtacagacggggttttaccatgttggccaggctggtctcgaactcctgacctcaggtgatccacccacctcagcctcccaaagtgctgtgattacaggcgtaagttaccatgcccagcctattattattattattattattattattattatttcaagttagagtctcactctgtcacccaggctggagtgcagtggcacgatcttggctcactgcagcctccatccacctcccgggttcaagcgattctcctgcctcagcctccgaagtagctgggattacaggcacgcgccaccacgcccggctaattcttttgtatttttagtagagacagggtttcgctatgtagaccaggctggtctcgcactcctggcctccagtgattcacccaccttggcctcccagagtgctggaatgacacgtatgagccaccacactgacctttttattatttttatccaccatctcgctgcaatttcagtattgcccatcgacctatattgcctcctggtaatgacccctgaggaatgagccatgccatttccataggtggaggcgacgggtcatggtggtgagaacttcactgacctggaagaggtggagaagatgctgggaagctgctgagggctgcccacctgtgttaggagaaggcagatggggacccatggggacagtaatactattttggatccacacaacgggagtggaaaatgccttgaggcacagcagcgtctgaggcgggtgagaaatccggcctgcagagtcgcggctggccttcagatctgcgggctgcctgtgagatgccgtgttacctaaatccatttgggcactgagttccaggagtgggggcaagaattccgatgacggggctttatccggtgcgcatccagctcagagtggttcctgagaccagccaccatgggcagccaggatgtgctcatccttgaggctttccgaggcatcaaggagatggttggataaagaatttagcacagagcttgactgatggcaggcgcccacaacatgagacacattaataatgtgtgtggaggccaggtgtagtggttcatgcctgtcaccccagcactttgggaggcagaggtgggaagatttcttgaggccaggaattcaagaccagcctgggcaacacagcgagacctcatctctaccaaaaaaaaaaaaaaaaaaggaaaaaattcacctggcctagtggtgcacacttgtagtctccgctactcaggaggctgaggcaggaggattgcttgagctcaggagttccaggctgcagtgggctatgattgcatcactgcactccagtctgggcaatagagcaagaccctgtctcttaaaaaaataaagtctgttgaaaagaatgaatgaaggaaggaaggaatgagagggaaaccctgtctcagctcctcccgcagggaagctggggcagggcaggcagggggggcatccggccccgctccctcccttactctggcccagaaagcactggtgccatctgcacagggtggagccaaagaaagtgccccactcacagcagagggaggccatttgaggacagcagggaaaatgggatctcagccatctaggagggggccagagatgtgggatggacacctaggaaatccagccgaggacaccagagtggcttttgactctggtcccctggctgaacgcgttccctttacagtttaaatttaggctcaaggagaagaagctggcaatcggcagggccagtgctgtagagaggatgtagggtttccggaaaatagccaacacttcagcagtgctggctgcgagctcatccaagcatgttacgggtgttaactcatttcctctccagcaaccctgtgagagggtctgagtgttcccatctccattttacagaggctcagagaggtgcagtcctttgcctgaggtcacacagctagtaagaggcagagccgggatttgaaccctggcagtctggccctagagccccagctgttaaccattaggctttatagccccagttataacaacaataataatactaatacaagtgaaccttcactgagtgccatttatagatcaagcactattctaaggattttaaagcatatttaattctcacagcactctgatgaaggaggtattcattttacaattgaagaaacagaggcctagagacattgagtcacttgcgcaaggtcacacagctggccagtggcagagccagcctttgaacctgagccttctggttgcagagctacggcttttaggcaccgtgctgagggcctccagaatgacacagatgtggcctcgagttacacagggaggcaggttgagggtgacccccaccaggcctacccaaggctgggtattaataatcacagtgcatacaccaggcccagggaggttgagccactcatccaagctcacacagcaagctcacagcacactcaggctgtcatgcagcctgggctacccccttaaccctgcctggcccctgcagccaacagagacatggcatccatcgtgtctgagatcatgatgtatgtgctcattgtggtgttgaccatatggctcgtggcagagatgatttactgctacaagaagatcgctgccgccacggagactgctgcacaggagaatgcgtgagtagggtggctgggaggtgggagggcacccagggcaccgtcacacttgccagagaggaactccggagcccgggcagggaggaggcagcggagcggcccagggcgccatctctcagtactacccagaggggagtgctccctgtcagacacaggataggggtcgtcagacccagccccttcctccctccaactcaggagcccaggctcccagccagattcctcaaagaccctgaggagtccacccatagactccttctctctctaactaaggagccctgtgtacctggggtggagaccgctaccttcccccatcccccgggggttgggtcggtctgatgatggggtcactgtatacctggcctttcccccacagctcggaatacctggccatcacctctgaaagcaaagagaactgcacgggcgtccaggtggccgaatagccctggtaaggcggatgggctggcagaggggaaggggattgggaggggccgaagtcccccaggtccctaattccccctctcttgctccccttcaggccctgggccccgcctcaaggaagagccagccgtaatggggactctccaggcaccgcctgcccccagcgtgggggtggccactcctgggccccagaaagcctcagagtcctgccgacggagccactggggtgggagggggcagggggcttggctcgcacccccactttcgcctcctccagctcctgccccgccggccgcgcaccgccatgcatgatgggtaaagcaatactgccgctgcccccaccctgcttctgctgcctgtttggggaggggggcggtgaggtgggggcagcggccccgcacccctcctccttgctgatttgcacacattggccgcttcagacacgcacttctggggccagcccctccccgcctcctccctgcctggcggcaggggtcgcgatgatgggctggagcagtttggggcagggggttctgggacccactccgactccccctccccggcatcatttcccctcccgcttcctccggctggacctggggtcccccctccctgtaatgcactcctgccccggcccaacctcgccctctctcaccagccttgaactgtggccacctagaaaggggcccattcagcctcgtctctttacagaagtagttttgttcatgaaataaagactcttggacttgatgcatagtttcgattgtgagccccgtcaccttccccccattcccgtccccgaatcttcgagcccgctttccagggaccctacctgagggcccacaggtgaagccacttagtgcctgatctgtgtcggggttgggggagccatgggctcaggggtgagggagagtggaacggagccaggaagggagggggtgccgtggagggaagagaatcgaggctgatgctggggtgcaggggtggcatggggtgtgtggtgtgcccagcagtgtgagtctctggagaggtgggcgctggggagaaggagagggaaggagagacgggtatggatggaaaggcagaggaagccaggctaaaccagcgtgtcccaatgaggggccctgggctgagtggaggaaatgggtgcggtggaggtgggtttggctgggcacagcgggcacgtgtgggtaagcgggtggggccggttgtgcgggtggcctatctggggcaagcagccgaggccgactgtgtccggcgtgtggttgagcacgggcaggtgtctggcggtgaccctgcacgtctggtgtttacctggccctgggtctgacgtgggccgcgcctggctgctggcgggacagtgtgttatctgcctgcggacgcttccggccacttggcctgggcctctgcccttagcgctgtgttttcccggccaagccccccatcccccctatctagtgctaggactttctggctccagaggtcaccgcggccgggcggaggctgccaaagcaaaccagccccgtgacttgtaggaagccagcgggggaggggccggggcaggatgagcagggcaggcgggagaggctggggctggggttggggcccaggaattgggcagggaattaggcagaggtgcagcaagtggcgggcacagccaggacctggggctggaggacgcagaaagggcggggggaagggttcgctgggtgagggtggagtgggcttagggcagctggggccctccatctgatctcttctggtcagacccccacccttcagcctgcactttctccctaaacccccagcctccggccaggcctgtccctgttcccacatccccgcagacaggcacacctgggtccccctggaggtccaaggcaagccccgtagctgggcccgcctggtccagcccccacaagcccggccccatcagccaggtggcctccagtgctgccaatcgaatggtccggcccctccccgccccttcacccgcccctcgcccagccccctcctcctcaggtgaggcagcctggcctagcaggccccacgccaccgcctctgcctccaggccgcccgctgctgcggggccaccatgctcctgcccaggcctggagactgacccgaccccggcactacctcgaggctccgcccccacctgctggaccccagggtaaggacaagggcccccagactcacagttccagccctgaggacaggggttccctcatccccccacccagcctaatgcccacctcctaatagaggggttcctggggacctgaagagggggcactatgacgtccccccaagcacctaggtgttctgtcctgctcttccttcagactcagccgttggaccccagtcctttcctccccagacccaggagttccagccctcaggcccctcctccctcatactagggagtcctggcccccaaattcctcctttcccaagacttatgatttcaggtcctcagctgtctcctccctcaaaccgggatcctcagtcccctgctccaccaggctcaggcatgggggtccccatccctgcaaatccaggcgtccccccgctgctggtcagacactgaccccatccttgaacccagcccaatctgcgtccgtgatcacggcgtgctctggccaaggcccagtccctacagcctgcctggatggacgcctgggactgggggcgccaggactgggctgggctgggctcccccaggccctgcctccccgtccatctcctcacaggtcccaccctggcccaggaggtcagccagggaatcattaacaagaggcagtgacatggcgcagaaggagggtgagtccccttccctgagccccagctttggctctgcctggcgccccgccctctgtgctcttttctctaccctctactcttcggagccccctctctctgggcacccctcccagatgcatccccacccctgttagtcctcctccacctgattaactattaaccacattttctgtgcagctgtgccaccaccagcctcccttctaccctatgtgaccttcctggcgtgctgcctcagtttcccctcatcccccagtgatttctcagctaactctggacttgtcctctgctggggctgaggcggggaagctgtagctgtcatggttaaggacacagatttggagtgaaacacacaggcttgcatttgaatttgctcttgccatcttttttgctgtgtgatctggtgcaagtgacattattcttagggctttggtctccctctgggtcaagcatggataccagtcctccctctgtgaggttgctgagtgcatgacacacaccaggcactggtctggggctctgcatataagacgcatgccatcaagcagagctgtcatgacagaggttggcaaactcggagtcccagagacccaggacccccaccgatcccagacattcctccacctcctggctctgtgggcaaaagagcagagggaggactttggactgggcctggatggatggagaggggagagacggcagagaaaccaccataaggatgagagagagagactgcgtcatggagttgctggcccttgggagtctctgggcagcccccagctagcctggcttcctttctacctctcacacatgggacccagctggaggggcgcatggaggggcgtcctgttctttctgccttcccctagctggggctgactccctctcttcttccgcaaccaggatagccgggctcagtcctgggcagtagcactttctagctgtgtggccctgggcagacggcgtgttctccctgggcctccattctctcatctgtgaaatggagagggtgacagtgcatgtccaacagcgtggggcgaggcctgaaatgccaggatgggcaggaagcactgagcgtgttggctgaaatgattagttcagatctctggcctcctcgggtctcggcacagctggcaattcagaccccaaaccaatcagctgcagtccagagggaacccaggctcccagttactcaggagaaggcattgcaccctagccgagcaggtggatgacagaatccagctccttggggacaatctctttcctggagctgccggaaggacagccccagggcttgggcccatgggtgaatgagccagggaagaaaagcagaaaatgcccgaatggacagagatggcctgggtacaaagagaaacagacacaaagtgggctctggtgcctccctggcagctccgggctggtcttggaggggagtcctgctgtcagggctaggggtgtggaggtcgaacctggacacagatgctgaagggttccgattctgcacttacttgccgggtgacccgggtttggtggctgccggactttgggcctccttttctcatctgtaaactgggggtgatggcaatggcgccttcctcgtgaacagctgcaaggatttaagtaaggatgctgtgcaggactggacggggttagggtagggcggtgcgtccgtgtgtgattcagagagccgttgtggctgcagcggctgctgttgttggtgtcactgttattgctgctggcttcttggtgctgcctggaaacttggaattggaggaggtgatactggagttgcaattccaaggatgccaggcagagggaagagcaaggctcttgctcttctctgggaagctgggaggtgacacagcactggtgtgcacgtagccaattgtggtatttctggaggtgaagctggaagttgagctgggtgggagaagaggtgtgcaagctggaccaggcaggggtgggactgttttggggaagagctggccaattccttgcagtaccaggtctctccacaaggtggcgccagtggttagtccctgcttctcttgtctaacttgtattttacaagttctactgtttgggttgctttttggaagctctctctggtacctgatagtgacccacatggttgtctgagaattgggggaaacatactcccaaatctctgaaagccatgcttataccctagtggggctggaaatgccaggctgagggacttaagctgtctggggggtactagggagtcacagagggttctataggtaaagaggggacaggttggatttggtgtctcagtaggttccccaagcctccgtgtggagggtgcgctagaagggagactgagcccagcggttggatggggccggagcaaggtgcagatggagagaaagaaggaaacgggggaaggagagtcactcaggaggattggcaggctgtcgggggaggggaatgttatgcagatggggatggtcctaggagtgagggcctctgagacaggaccgggaggaagaatatacttggggagacattggggagacattctgggacctggtaggggcaaagggactaggaggtcccagggaaaggtatttaaaaggtatttaaaggactgcaggagccctgacctgggacctggaagagggtctagggctggggacagaggggaaactgagtccacagaggtgggtgagacagacttaggggcaaggaggagcagggggaggctgcggccagccctacaaactctggattttacggagtaggtagagggtgggtgaagacagcagcctcagaggcgggaaggaaaatcaggtgcgcctggtgtcccagaagtccaaagaggagagcatttatacaggaagctgcagtcatgtaagatgaggcccgagacacggagccaccagttgagtggattttcagagccagagagccaaaggtgttacgcgtgggggtctttgcagccaaatggtggaggcggaagaactgacctatgagaagacccaaggcatccagaggggcctggagaagcaggggcagagagtctcagggagatgtaggggtgggggaggtctggcttaccaagggaaatagccctgctgctgggatcaaagaattgatgttgacgtgccgcctgtcccagtagagacacgcagggaggatgaggatgcgtcccacaccctgggccagatgaggatgctgcctgtcccagtagagacacgcagggaggatgaggatgcgtcccacaccgtgggccagatgaggatgctgcctgtcccagtagagacatgcagggaggatgcctctcatactgggggaaccccaggatgcagatgcttcctgtcccactggaggcgctgaagtcctctgaaccacacagcatggaaggaggttcttcctctcaccctaggagacacatacatagtggcattgcttcctgtcccaccagatgtgccaaggcctctaggctgcattctgcatggcctagagccctggcaggcacagctgaaaacaaagcaagcaagaccagcccagtggctgtcgggagccaagacctcctgctggaacctggagagtggtcctgggcagagttggggggcaggcctgagaacccctcgcaggacaggcaggggtcagccggcagtagttgggctggtctggcccactggggcctcttttggggaagagagtgtttcctcatgccttgatgggagccactgagctttcaatttttttttttttttaatacagagtctcgctctgttgcccaggctagagtacagtggcgcaatcttgattcactgcaacctccacctcccgggttcaagcgattctcctgcctcagcttcccgagtagctgggactataggcgcccgccaccacacccagctaatttttgtatttttagtagaggcggggtttcaccatgttggccaggctggtcttgagctcctgacctcaagtgatccacctgcctcagcctcccaaaggaccgggattacaggcatgagccaccatgcccagcctgagctctcaaattcttaagacacccagataatggccacaccaggaaggtcctagaccactccctgctctgttccaggtgctggcctggtgccgggttcaccagccacatcaccatgggtgcagatgggcgagctgggagctcctgccaccttggggtgctttgcggctgccaagggcagttgaacccaagccaggcccagctgaaggctttcagcagcctttactctttggccttcttataatccctagtgaaggggttggcttttatttatttatgtatttatttatttatttattttttgagacagagtctcgctctgtcgcccaagctgaagtgcagtggcgcgatctcggctcactgcaagctctgcctcccgggttcaagccattctcctgcctcagcctcccgagtagctgggattacaggtgcctgccactgcgcccggctaattttttgtattcttagtagagacggggtttcaccgtgttagccaggatggtctcgatctcctgacctcgtgatctgcccacctcggcctcccaaagtgctgggattacaggcgtgagccaccgagcccggctaggagttggcttttaatctccaggacctctttgccctgggaataaaatcccttttcctgtgccaccaggcctccccagctggccccagccttggttcccactaccttccccaagctctggccatctggccatctcgatggcctctccagcctctgacataagagagcctgcttattcttgcctcaaggcctttgcctgtgctgttccctctgcccacagtgcccttccttgtggtctgtgtgtggctggcacctcacctttcagagcttagctcagaagtctcctctaggggaggccctgtgatccctgatcccctgcagaagcccacctgctgccccagcctgcacggttttcttcacagcctctgccacaatctggaaattattgggttcatttacttgtttccttgttaatgtctcccactccccacctacacgcatgagaacgtgaacccctgagagtcgtaaccttatctgtcttctttgggttatgttcccggaacctagaaaggtgccaggcacacagcggatgttcagtaggatggtaaacaaataaagcttctttaggctgatgaaaaaactgagggtcaggcgcggtggctcacgcctgcaattccaacactttgtttgggaggctgagacaagcagataacttgagtctgggagttcacgaccagcctggtcaacatggcaaaccccgtcaatacaaaaaatacaaaaattagccatgtgtggtggtgtgcgcctataatcccagctactcgggaggctcagaattacctgagcctgagcgcttgagactgcagtgtgccatgatcgcgccgctgcactccagcctgggcagcacagtgaaaccctgtctcaaaaaaaaaaaaaagaaaaagaaagagagagagagagaaaaagaaagaaagaaagaaagaaagaaagaaagaaagaaagaaagaaagaaagaaaaggaaggaaggaaggaaaagaaaaaaactgaggctgaggctcagagaggggaggggagttgctcaggcccacacatctctgatgatttataaagcatttatagagaacttgctatgtgccaggcacttccgcacagtgagagccaggatggcttcgtggctgtacacaggggacctggcatcaaacctgcccagggttctggacgctgctctgcctcttccaggctgtcactgtgggcacgtgaccccacttctctgagctatctcaaaaacaggaatcatagttgtgggattgaaataaggactaaatgagctgatgtatttagaacggtgcttagcacctggaggcatcaatacaatttgagctattcttcttcttcttgaaaataactttaaattattatttttagaagtaggtgctcagtggatgcccatttaatagataagaaagttgaggctcaaagatatgatggcacctgccttaggttccagctaggaaggggtagggtcaatatttttaaatgaggctggccagacgcagtggctcactcctgtaatctcagcattttgggaggctgaggaaggaagatcgcttcagcccaggagtttgagaccagcctgggcaacatagcaagaccacgtcgctaaaaaaattaatacataaaataaaatgaggctggcagattttcaagtggaggggcaaatttgatcttgcaactgggtaccatgagagaggtctgatttagggggtatctaggggcaaagcatctagaacagcagaaacgactgaggcagcgaggaaatgccagcggcagggaagagagctaccaagagggcaaaggttgggggtcacagtcccaagaagagatggcccaaagcaaagacagaaatacaaaagcacagtgtcactggggaggagacattccctaagtgccaggaaagtgcagggcggaggtggagaccgtggcaggtggcccggccatgcccccctcccagctggaaccctgggggagctgggcacctggttgttcacacggcaggggaggaacagccctgtcaactgctggccccgggaaactgggcctggggaggacatgcttgggcataataagttagccctgggggcagggcagagctggcctcgggcccagaccctgccgcaatgaggacaggcctggctgtggccccagcatggtgtctgttgcaggtggccggactgtgccatgctgctccagacccaaggtggcagctctcactgcggggaccctgctacttctgacagccatcggggcggcatcctgggccattggtgagagcggttcctgtgcctctgacctcccctggcccctgcagcctccagcctgcctgccctcacccctcccttctctgcagtggctgttctcctcaggagtgaccaggagccgctgtacccaggtgagtggagcaggctgggaccctctgggggagccctggaggacacgtgtatctggcgggagctcaacaagcgtatttgttgaataaatgcacaaatgcatgcagaaatgctaatcataatagtgcatttgtattgagtgcctgctatgtaccaggcactattctaagcaccccacatgtctaacccagactttttcagacaccagtgtattactcatgagtgcctcataaaattaaattagtgagttggaaaaccatgttttttttttaagtatgaaatagattcgattacagactatcacagtacatctctcagtaagtaaaggttatgctaatttttgtttgtttttttttttttttgcatccatatacatgtaatcccactgcatccccacactctgagggtgggactgttattctccctgttttacagatggggaaactgaggctttgagcaatgcagcagtttgccccagactacagagctatgggctacatcaggatgtaaaaatgtgtttcttactgcgtggcatggtgaaaacatgttggggaggcatgatataaattcagtggacccttctaactctcctaggaggtagtttttttgtttgtttgttttaaaaaagaaaaaagtcttgctctgtcacccaggctagagtgcaatggtgcagtctcagctcaccgcaacctctgcctcccaggttcaagcgattctcctgcttcagcctcccaagtacctgggaatacaggcgtgtgccaccatgcccagttaattttttgtatttttagtagagatgagatttcaccatgttggccaggacggtctctatctcctgaccttgtgatccacccgcctcggcctcccaaagtgctgggattacaggcatgagccactgcgcctgtccctggtaattagctccattttacagatgtgcaaaatgaggaccagagaggacatgcagctggggaacgaggggccaggaacagctcttagacttatccactgtaagtgtgtctgcaggcatgtggaatgaatggccacacaaataaatagataaagaaactaactgtgggatgaatgaatgaatcttcccaaatgccaacttcaagctgccattccctgatgcaggacagcaggaaaaaaggggaagttgggtggtgggatgtatttttcatgtctgtgagcctcatctaattccataaaggattcagttcacactaaaatcagaaatgaaaatccagacaagaaaagccaacatcaacattaatcatcattaccagcacttagcatttgtatgcaccagccaaggccttgggaccttatgatatcaactcattaagtcttcccaacaacctgttgtttttcttttcttttttttttctttctttctttctttcttttttttttttttttttttgagatggggtcttgctctgtcgcccaggctggagtgcagtgacacgatcttagctcattgtaacctacatctcctgggctcaagcaatcctcccatctcagccttctgagtagctgggactataggctaatgccaccatgcctacacaaaattattttgtcaataacaaattattgttatttttatctttttgagccagagtctcgctgtgtcgcccaggcaggagtgctgtggcgcgatcttggctcactgcaatctccatctcccaggttcaagtgattctcctgcctcagcctcctgagtagctaggactacaggcacgtgccaccacacccagctaatttttgtatttttagtagaggcggggtttcaccatgttggccaggatggtctcaaactcctgacctcaggtgatccacccgtctcggcctcccaaagtgctgggactacaggcatgagccaccacacccaacctcattttttaaatttttagtagagatgggatcttgctacattgcccagtctgatcttgaactcctgagctcaaagcagtcctctcagatcagcctcccaaagtgcagggattacaggtgtgcaccaccacaacccattttcctatggggatgctgaggcacagaaaggctgagtgacttgccccaggtcatggagctagtcagtgtcagggctgggatttgaacccaggcagcctgcgtagtaactgtatatagtgtctacacttgattgcttgttaaaaaaaaaaaaaaagaacagctgaattcattgccatagtaaagactgacatatgccaggccctggcggcagcctttacccagcaggcctatgaagttagggctgttacatcccaacattttgcatttgggggaaattgagtcccagtgaagcaaactgacttgcccgaggctgaccacacatcagagacagagcgaagggatcacgcccctgtcaaaagcccctccgtgacaacacgtggcattgagataaaatcccaacccatcacaggctccaagcctcctagtgtggaggcccctctccacccccacctcacactggcttctagcaccctcagggcccagtcccttgctcaaatgacctgctcacacagaagtctctactcacccacttctttctagctcacacccagaggcagatttcagttctgcacagttccttctgagctgtggggcctcccaccagtccctactctctccaagactcaatttcctcatctgtgagatgggggtaagaagaatcagtgggaataagaggagataaaaatctgtgtagtacttgggcggggtgcggtggctcacccctgtaatcccagcactttgggaggccgaggcaggcagatcacctgaggtcaggagttcgagaccagcctggccaacgtggtgaaacctcatctgtactaaaaacacaaaaattggccaggcgtggtggcgggcgcctgtaatcccagctactcaggaggctgaggcaggagaactgtttgaacctgggaggcgcgggttgcaggttgcagtgaactgagatcacgccactgcactccagcctgggtgacagagcaagagtctgtctcaaaaaaaaaaaaaaaaaaaaaggctgtgcagtacttgcctcttagccagcacagtggacattggcttttgtatctcactcctgaaattctttcttgaaatttcttgagcaagatcttcctggacttccagactctatggcctctcaccctatggtgtgtccctgccaccccggtaaaaccctcctcactcattgtgaattatttactcctggcgaactccaggaaggcagggaccttttgtggtcagacggtgcctggcacatagtaggttctcaggaaatccttgagttatgagtgcacccaaagccaaaacactgggatgaactagagagtcatgggcctccagctggaaaggagcgaggccaccactcacacccggctctggccagcaccacgccgccaccctgcagaggtatttgggtttttcaacaactcagggaaatgatgaaacaaacaaacaaacaaaaacaaccccaagcttgtatccccacctcgctttttttttcctgggattttcacacttctaaatatatccaacaacttggcaggcacaccaggtgacccagaacatcctttttgtgttgcctgaaatgataggaacaagaataaagaatttaaaagtgagaaacagcagcagagagtgtgactttaaaaatagccagaggggacatttgatgttctctccccactcccatctcccccaacacacatctataaagtgattttcccccctaaaacctcacactttctggaaatcacatttccagagcagttaacagtcattttaaaataagaatccacccctcttcctgccccagctggtgtttcaaactccaagccttggctttcatggggtgatgaggaccccccagctagaggtgccaggcattccctgccccaaccccagagcaggagaccgtaattaaggcaggccaggccggtgcggtggctcacgcctgtaatcccagcactttgggaggcccaaatgggcagatcacttgaggtcaggagaccagcctggccaacatggcaaaaccccatctctactaaaaatacaaaaattagccgggcgtggtggctggtgcctgtaatcccagctatttgggaggctgaggcatgagaatcgcttgaactcaggaggcagaggttgcagtgagctgagatcgtgccactgcactctagcctgggagacagagcaagactccatctcaaaacaaacttaaaatagaataaaataaaataagaatccgcccccctccccgccccagttggtgtttcaaaccctgagacttggccttggaattcatggggtgatgaggaccccacagccagaggtgccaggcgttccctgccccaaccccagagcaggaggccatcattaaggcaggccagccaggtggcttttcagtgccagccgtagctgaatatattaggcagggagacaggcaagggtttgtatgagacccacagaaggaacagggaatatgctggtctgggttcaagtcccggttttgctggttagccgtgtgcctctgggcaagtttattcctctgaggcttagttttcccatctgtaagatgggcatagaagtggtcactactggctgggcacagtggctcacgcctgtaatcccagcacttggggaggccaaggcaggtggatcacctgaggccagaagtttgagaccagcctggccaacatggtgaaacgctgtttctactaagaacacaaaagttagccaggtgtagtagcatgtgcctgtaatcccagctactcgggaggctgaggcaggaggatcgcttgaacctgggaggcagaggttgcagtgagccgagatcatgccactgcactccagcctgagcaacagagcaagattatgtctcaaaaaaaaaaaaaaaaaccgaagtggtcactatctccgaggatggttgtgggattcagagagccacttggataggatgcatagcatggggccagcccactgacaccccccagtaaacgtagccagtgctattattactgtgctgttgtttaaccctccagaggggaagtctcttgagaggctgtccagggcaatgttaaaagcttggggtttgaagtcactcagacctgatttcgaatcctctctccctgcttctcgtgcatttggtgacgttggggaagccaccccacctctctgagcctcagcttccccgtctggaatttggggatgatcttcgtggctcctggggtgtgcgacgaggccttggttgatggtggggcagaggtagcctagccccaggaacacagtaggtcctcagctggggagagttctacttggaagtcttgcttctccttgtcccaacctgcggggctgtgggaagacccctcagctggtgtgtggcctcaccaggttccttctaagaggatgcaaaagcaagttttcatttgactcggtttcccagaatgtgctctcagagcccaggccaggcaggaggctcttgagaaaaggacaaaaagacatggtggctcacacctgccatcccagcactttgggaggccaaggtgggaggattgcttgaggccaggagtttgagatcagcctggacaatatagcaataccctgtctctacagaaaaaaataaatttaaaaggcgtttttagctcaggctttgctgggttctaacctggctattgtcactcagctttatcctaacataaaaaaataaacaaattagcagggtgtggtggtatgcccctgtggtcctagctacttgggaggttgaggcgggaggatcgtttgagcccaggaggttgaggctgcaatgagctatgatcgtgccactgcactccagcctgggtggtggagcgagaccctgtctcaaaaaagaaaaaaaaaagtggcagggagaaggaaaggaaaggacaaagaggttcacagctgatctctccctgaacctgctccttccgtccccatctctgtcagccccatcttttcaggctcaggccaaacccctcggttaccctcccagttcctccagtcacccatgaatcagatcttgcaggaaaccctgtcagctgcacctacagaacctctccaaaatctgaactcttctccccgtccactgcccccaccctgctccagcccccttcccctcccctctggacatcccagagcctcctccctggcctccctgctcccatccctgccccccaatcatatcccacaaaggggatatgactcactcacttaaccggcaattctggagggtcttaaaacctggctgcctcaagaggctttaaaatgttatcagatgggggccaggtacagtggctcatgctggttccccacttgcagccagagggagctggtgaccacctgagtcaggtcagggccctcccctggctgcacctcacaccaggtgccagcaaagccctgatgttgctctatttctagctcccacctgatctgcccctccctggctcactctgctctggcctcccactgttcctggagcactccccccagtcccccacaccagccttgggatctttgcatctgcaagtccctctgtctccgtgctgatctcacacacctcctgacactttctcacctcctgcaggtctttgttcttgcaccaccttcccagggacgctctccttgcagcgactgaaaagtgcaacctcaccccaccctccatgccggcactcccctccctcggtggcattttatttttctctgtggccccttcctatcttgtgacacataatatatcctacttatttgtccctttcttgatttgtctcacctactgagctttgagttccacaggggtcggggtttttgtctgatttgttcattgcagtggtgatttgttcactgcctaaaatagagcctggcaggtacaaagtgtttggtaaatagaaatcaataccccagggtctgtgacctgacttaggtgttaacaggttcctctgaggtgtgtggggaacagactgaggggtttcaggggacatctgttctcaccacaaattgccccccaaccagccccagacatgaacagtctcccgggagctccctctagccttctcgtatatcccagccctgcctcatgtcacaatttgtaatgatgtgtttggctgggtgacattttatggccatctgtctccctatcccctataatgtggtttgccgaaagcaaagcccaggactgtctcggccatctgtgtctccaggatcacccctcactgggcatggagtatgtgtccagttaacgcttgctgagtgaatgaatgaatactccatcctctgcctggagaattacgcactttagcatatccaaggctctgacaagtcctgcataaaagagcattattgttttctttctttctttccttctttccctcttcttttctttctgactataggatattgattatcaatctggcaatagtcaagattggcagtctggtgtattagtcaaaggttttcagcctacaaaagacaaaaagaaaaaataaactggctaaaaacaaaaggggatatgatttactaactcacttaaccgacagtcacagaggttcttcaaacctggctgtatcaaggggctttaaaatgttatcagatgggggccaggtgcagtagctcacgcctgtcatccagcactttgggaggccaagacaggcagatcacttgaggtcaggagttcgagaccagcctggccaacatggtgaaaccccgtgtctactaaaaatacaaaaaattagccaagtgtggtggcatgtgtctgtagctccagctactcgggaggctgaggcaggacaatggcttgaatccgggaggcggaggttacagtgacccaaggttgcaccagtgcattccagcctgggtgacagagcgagactctgtctcaaaaaaaaaaaaaaagttatcagatgggaaatgaattccgatattaaaaattgatatgtatttatactatattattaaagttatttttcataaaacatagaagggtaagtttaagaaatgagaagtatttataccaaaatgattaaatattatttaatttaaagatataaatgtcttgttggacaaataattcaaaatttccattagacaggaaaaataagttcaagagatatattgaacaacatggtgattatagttaataacaatatattatatacttgaacattgctaaaagatattttaagtgttctcaccacacacaaagggtagtgcatgtgttaattagcttgatttagccgttccacaacgtatacatatttcacatcatcttgtacaccatcaatgtatataattttgtcaattaaaataaatacatattttaaggccgggtgcagtggctcacacctataatcgcagcactttgggaggccgaggcaggcagatcacctgaggtcaggagtttgagactagcctggccaacatggtgaaaccccatctctacttaaaatacaaaaaaattagctgggcatggtggtgcatgtctgtaatcccagccactcgggaggctgaggcagaagaatcgcttgaacccgggaggcagaggttgcagtgagctgagattgcaccactgcacaccagcctggacaacagagtgagactccgtctcaaaaaaataaataaataaaaataaaataaatacatatatatttttgagatggagtctcactctgtcgcccaaactggagtgcagtggcacgatcttggctcactgcaacctctgctgcccaggttcaagcaattctcctgcctcagcctcccgagtagctgggattacaggcacctgccatcatgcctggctaatttttgtagttttcatagagacgaggtttcatcatcttggccaggctggtcttgaactcctgaccttgtgatccacccatctcggcctcccaaataaatacatattttaaaagatagaaatcactctggaaggagagttaatctgtttgatataataataataatatattaatattatattataacaatatattagtattatattctaataatatattaatattatattataataatatattattatattataacaatatattaatattatattataacaatatattaatattatattatgtaataataatactactccatatagctatggaaaagttcatatgaagaaaccaggctatgatctacaaactggcaacaaatttgttcttctattttccatatgctgtctgtgtacgtataaagtgagaggtctttttatatgagttaagggtgtgaccaaagacaaatggaaaaagacaaatgacaaacatactaataaagagcttcggtttctccacaaaaaatacaataataaaataaaatgttatcagaaatctcttgactctcctccacgttagctcactttttccctcaagagggtgaacatgacccttaacagatccagcctcaagtgctggattctcttgggaacttggttaaatggttttttttcttcccgaatgtccaagtcaccttccagacctgcagctcctgagcagccaacttaggacttctaatggagagtgaagttcccctggttcgcggaggggccggccacagcctcaaggctgctgttgattggtccgacctgagtccttgagtctggcagagtgccatggtgctctgtaatcccacctgtaatcccagcattttaggaggcagaggcaggaagattgcttgagcctaggagttcaagaccagcctgggcaacatagcaagacccgtctctacaaaacaaaacaaaacaaaacaaacaaacaaaaaaattagtcaggtgtggtggtgcacgcctgtggtcctagctactcaggaggttgaggtaggaggatttcttgagtctgggaggtcaaggctacagtgagccaagatcacaccactacactccagcctgggcaacagagcgagaccctgtctttaaaaaaaaaaagtccttgagtcatgattccagatgcaatcgcagatgtgggggctgcaaccctccgatgggctggggttcacgtctacaccacatggctggagcacaggccaggaggggctccggctggggaagcatgtggggagcctggctgtgggacccaggcggccccgggccctgtcgccctgcagtgcaggtcagctctgcggacgctcggctcatggtctttgacaagacggaagggacgtggcggctgctgtgctcctcgcgctccaacgccagggtagccggactcagctgcgaggagatgggcttcctcaggtactgggggccctcggaggggtgggagccgggaggggctggggagcaggcctaacccctgccccgcccagggcactgacccactccgagctggacgtgcgaacggcgggcgccaatggcacgtcgggcttcttctgtgtggacgaggggaggctgccccacacccagaggctgctggaggtcatctccgtgtggtgaggagggcagcgggcaggtggggcaacacctcagacccccaaggcactccctctccccgttttccttccacctgtcttaactggtctctatttcctttctttctgtgtctccaatcccatctctcccagtgattgccccagaggccgtttcttggccgccatctgccaaggtgagatcctaaaactcagaaccctctcctttaggcccttggggaggccacgtcccctcaagctccccaggatggggccatgtactttcagaccccctagggcagggccaagcctgggctctggggacctgggctccagtcccctgtcgccgccccctgctgacccttgtcccacagactgtggccgcaggaagctgcccgtggaccgcatcgtgggaggccgggacaccagcttgggccggtggccgtggcaagtcagccttcgctatgatggagcacacctctgtgggggatccctgctctccggggactgggtgctgacagccgcccactgcttcccggagtgagtgccccccaatggcgctgatgatggggaggcagaggagcggagagacagtggggaggagggcggattgtgcccaggcaggtggccaccctccacccctttccctggtaggcggaaccgggtcctgtcccgatggcgagtgtttgccggtgccgtggcccaggcctctccccacggtctgcagctgggggtgcaggctgtggtctaccacgggggctatcttccctttcgggaccccaacagcgaggagaacagcaacgatattgccctggtccacctctccagtcccctgcccctcacaggtaagtctaagggctgagccatggggcttgaggacccgaggccaggaggacagaggaggggaccaggggcacaaggcaatcaacttatggctcaggcatccttggcaataaggggaatgatctcgagggagcacaaagtgggccttaactatcaatgatcagtgcagccaatttggaaaatttgccagcatttccccaagaagtatacataaagttaccattggacccaacacttccactcccaggacaggaggtatatacctaagacaaatggaaactgtgtctgcaccaaaactcgtacatcagtgttcatagcagcattattcataatagcccaaagatggaaacagcccaagactgtttcatcggacaaatgcataaagaaaatgtggtatattgaccgggcgcggtggctcatgcctgtaatcccagcactttgggaggccgaggtgggtggatcacgaggtcaggagtttgaaaccagcctggccaacatggtgaaactccatctctactaaaaatacaaaaattagcctggccaacatggtgaaactccatctctactaaaaatacaaaaattagcctggccaacatggtgaaactccatctctactaaaaatacaaaaattagcctggcgtggtggcacacgcctgtaatcccagctactcgggaggatgaggcaggagaatctcttgaacccgggaggtggagattgcagtgagccgagatcacaccactgcactccagcctggctgacagagcaaggctctgtcatcttgaaaataaataaataaataacaaaaaaaatgtggtatatccacacaacgggagaatattggaccatagaaatgaatgaggtactgattcatgctaccacaaggatgaaacttgagaacagtgctgaatgagacaagccagccgcaaaggccacatactgtaggatgccacttgtatgaaatgtacaaggctgggcacggtggctcacgcctgtaatcctggcactctgggcagctgagatgggaggattgtttgtgctcaggagtttaagaccagcctgggcaacatagcaagaccccatcacttaaaaaaatgagctaggtgtggtgacggatacctgtagttccagttactcaggaggctaaggcaggaggatcacttgagcccaggagtttgaggctgcagtgggctaggattgtgccactgtactccagcctgggtaacagagcaaaaccttgtctgttaaaaaaagaagaaagaaagaaagagaaagaaaagaaaggaaggaaggaagaaaagaagaaaagaaaaggaaagaaagaaaagaaatgtctagaataggcacatcggtagagatagaaagttgattgatggtggcagggtgggaggtggggatgggagattgggaggtgactggtgaaggacacaaggtttcttgtctgggtgatgaaagattctaagtcgatcatgatcatggttgcacttgtctgtgactacacaaaaagccagtgacttgtgcctttaaaaggaattgtctaatatgtgaatagtagttcaatcaagctgttaccaaaaaactaataaaatgaaaagaaaatgtgttaaaaatgaatgaatcagacttagaaagtaagttaggagtcattccctctgcaattccctggagtattcccttggtcttactgagactcacttaggtgccaacatgtccttaacacctctccaacacatacatcttccttttggattaaaagcaggccctgggcttcagatttcagcaggctgcagtgtaataataataataaaaataggctgggcatgtaatcccaggccaaggtgggggtatcgcttgagctcaggagttcaagactcgcctgggcaacatggcaaaaccccatctctacaaacaaaaaaaattagctggctgtggtggtgcgcgcctgtggtcccagctacttgggaggcggaggcaggagaatcacctgatcacccaggagatcaaggctgcagtgagccatgatcacaccactgcattccagcctggttgatagagcgagaccctgtctcagaacataataataataacggtgataatgatgatcatgaagtagtaatagcgagtagtattcgagttcatgattgagtattcgagtatagcgagttcatgatcatgaagtagtaaaagggaataagggagtacatgatgagtgtacacaacacagtaaaataatctggtaaacatagcagtgtgccaggcaccattccaaatatgtcctgtgtatggactcacttagttctcacagcaaccccagcacaccctggtaaggagggttctcttaagatcctgttttccacccaggaaaaggtcccaacccaaagaaggcaaacaatgccccaaattcgtacagctggtgaacggcaaagatttgtgcccaggtggactggcactggaatctgtgcttgtggcccccacgctgtggtgacggagaatccagggccatgttggggttggcattatgtttatttttatgtttattttatttttcatgatctgtggtactggtttcccattgaagggagtgatacatgcttttctttaaaaccaaaccctgtcctgacatggtggctcacgcctgtaatcccagcactttgagaggctgaagcgggcagatcacttgaggtcgggagtttgagaccagcctggccaacgtggtgaaaccccatctctactaaaaacacaaaaattagccaggtgtagtggcaggcacctgtagtctcagctactctggaggcagaggcaggagaatcacttgaacccaggaggtggaggttgcagtgagccaagatcgttgccacacccttctccttagtgaaaagagtgagagagttaatattgaagtaaggacgcatctttgaggacaggtggacaggtggaagcggctgggatttcagacacagggctgagggggtcacagcatgggctttggggtcagattcagatatttgccaactgtgtgatcttggacacatggcttcacctcaccgtgcctcagtttcccttatctgtaaaatgacttcctagggttattgagacaattaaaagggttaatatgagtaaagagcttagagaactgccagcacatagtgaacactggtaaatgttagcaattgctactattgttgtttaatacttttactagttatatgaacacttgctgtttgcctggcatgcaactcaatgactcaccaatttctcactacaacttctggggataagtgattattatttccattctacatctgagagctctaagactcaggcaggtgatgtcatcagcaggcagcaggcagcaggcaacaggcagggctgccaggaacccttgcataggttgtgcactgcacaaggacaccacatctcagggttaccactctctctgtagacctgtgtatttattattatgattttctgctaggtggaagtcaaatgtctcaagataggagtgtctctctctctctctctctctttcttctctctctctctttctttttttgagacagagtcttgctctgtcacccaggctggagtgcaatggcgcaatctcggctccctgcaaactctgcctcctaggttcaagcgattctcctgcctcagcctcctgagtagctgggattacaggcacctgccatctgtaatcccagtgctttgggaggctgaggcaggaggattgcttgagcccaggaggtcgaggctgcagtgagccatgttcctgccactgcactctggcctgggtgacactgcaggcttagaaatgaaaacaagctgtgttaaaacatacatgttatgaaactttggacacgtgacttggcctcattttccccctctctaaaatgggataatatagaccctacctctctgggctgatgaaacattaaagaaaatggtgcaggaaggcgcctagtatgcgatgagctcttggtacgtggcgacttccgttgtggcttttttgtttgtttgtttgtttttgagacagagtcttgctctgtcgcccaggctggagtgcaatgacatgatctcggctcactgcaacctccacctcctgggttcaagtgattcttctgcctcagtctcccgagtagctgggattacaggtgcgtgccaccatgcccggctaatttttgtatttttagtagagatgaggtttcgccacgttggccaggctggtctcaaactcctgacatcaagtgatcctcctgcctcggcctcccaaagtgctgggattacaggcatgagccactgtgcccagcctattgtggttttttttttaaagaacagagagggcagggtgtgttaggggccatggtagcagctggacagaggtttgtaccaggtggggcaggccagcgggggctggaccagcattgtctctctcacagaatacatccagcctgtgtgcctcccagctgccggccaggccctggtggatggcaagatctgtaccgtgacgggctggggcaacacgcagtactatggtgagtcctgtcctctgcctctgatgccaccgtttgggagactctgaactaggctggggatgggcagtctggctggttggatgagtcttgaccatgaggagtagggacgctgaggggaatggggtgggcaccaggagggaaggggggtgtgtacaccccccagctctggccagccttgcctgcacacccccaggccaacaggccggggtactccaggaggctcgagtccccataatcagcaatgatgtctgcaatggcgctgacttctatggaaaccagatcaagcccaagatgttctgtgctggctaccccgagggtggcattgatgcctgccaggtgagggactctgtaggggcagccccctggtcgctgccaccccagggatggagatgcaggggagtgggtggtcaggctccccatctaaaagcctgagggctctggggccacagcccatgtcatcccggggtgggcctcctgtccaaccactttggccttcagccagacctccctctcccctcccagggcgacagcggtggtccctttgtgtgtgaggacagcatctctcggacgccacgttggcggctgtgtggcattgtgagttggggcactggctgtgccctggcccagaagccaggcgtctacaccaaagtcagtgacttccgggagtggatcttccaggccataaaggtgaaagttgggtccagatgggagccagggtggggacgtttgggtgtctaatgggggaagggaggcagagatttgttttaggaaacctacgctcaggcctagaagagggccccccttgggaacagatggactttgaagggttcctggggaagggaagccagtggtgggacgtggaagcctctcagacctcgggagcccccagctgtctttccccagactcactccgaagccagcggcatggtgacccagctctgaccggtggcttctcgctgcgcagcctccagggcccgaggtgatcccggtggtgggatccacgctgggcctaggatgggacgtttttcttcttgggcccggtccacaggtccaaggacaccctccctccagggtcctctcttccacagtggcgggcccactcagccccgagaccacccaacctcaccctcctgacccccatgtaaatattgttctgctgtctgggactcctgtctaggtgcccctgatgacgggatgctctttaaataataaagatggttttgattaatgtggcctccgagcttacaaatgtacacagcaatgaggacattttgtcaggaaggaagagaagaattaggacctggcgcaaatcagacagagagtgtgggtccctcagttcccactgatttgagatttaagattttaattggttcacttaactggaattttcctggagcaaattggcttcaggtacagctggatccagctgctctctcaaatctgccttaggctgtgttagcttcatttccaagcagcctctcctacaaccagagagagagatgtccccttccacacaaactctttcccaatcactgcagaaaaagtcccaggcaacaacaacaaaaacccaggcccagctcccattgtacagatttgggtcacgtgctcatcccttggcaaatcactgtgcaccggatgtacgcggtaggggtggagcggggtggagtgggaggcgctaggccttcaagaatcgtgtgacctgagtgtgggagtcccaaaggaaatagggtgctatttccagaagtggaaatagatgctcagtgagcaaaaaagacatctaccttgaaccaacacggaaaacggggccctgtaaggtggagatagggagacgctgggaacacagcctgagaccctcccccaacccctttctccatctgggcagcttctggggaggaacccccttctgtagagcctctgcagagcctcatgcagccccgatggccaccagggggcactgctgccccaacattgtgacacattaaggggtttcctgcctggagtcagccgcatgttgctgaaaacctgctgttctgctgaagaaaggctcagcgggggagcctgttcaccatgactttaaataataacaattatcatacatcacccatggaccacagcttccaagcaatttcctttttttttttttttttttttttgagacagagtttcactcttgtctcccaggttggagtgcagtggcgtgatcttagctcactgcaacctccgcctcctgggttcaagcgattctcctgcctcggcctcccgagtagctgggattacaggcgtgccccaccacgcccagctgatttttgtatttttagtagagacgggctgtcaccatgttggccaggctgctctcgaactcctgacctcaggtgatccacctgcctcggcctcccaaagtgctgggtgtcacgcgcatccatgtgaagagaccaccaaacaggctttgtgtgagcaataaagctttctaatcacctgggtgcaggcaggctgagtccgaaaagagagtcagtgaagggagataggggtggggccgttttatgggatttggataggtagtggaaaattacagtcaaaggggtttgttctctggcgggcaggggtgggggtcacaaggtgctcagtgggggagcttctgagccaggagaaggaatttcacaaggtaatgtcatcagttaaggcaggaaccggccattttcacttcttttgtgattcttcagttacttcaggccatctggatgtatacatgcaggcttgggctcagaggcctgacactgggattacagatgtctgctgccacacctggctaatttttgtatttttagtagagacgggtttcaccatgttggcaggctggtctcgaactcctgacctcaggtgatccgcccaccttggcctcccaaagtgctgggattacaagcctaagccactgcacccagcccagcttcctaaaatatagatgatctacaagagctcctttgagaaactgacaaactgtgcatttggaaaacgatcccagcgtcactccccgatccccacacccctggcgaggttgagccccaccactgctttgttggtcaggagcccccaggcccacatcgtgttagcagagcctcagtgcagtttccccaaacgtctacctctggctgtggtgttctacccatggcatgtgggatgtaatttgagacctgacctacggcttgctttgttagaaacgtattgagttacaacacggagtgactgagttttcctttgtaattgccagctgagaaatgtactgtacctgtgttttaggaagtctggggactctgagagaacatggtccaccctgggggttctaaactgaggtgaccatgtcctggagggacacagtttgctctggtgaggagaagggcgggtgtgaggggcactgaagaaggcatggccctgccctgggaagtctgggggggatgtggccttattctaggggatctgatggaaatttggtcattaaaagccaacaggcatcctgctgggaaaataaaaaccaggtggccatgttattggaaaggggtcctgatccagaccccaggggttcttggatctcgtgcaagaaagaattcatggcaagtccacagagtaaagtgaaagcaagttgattaagaaagtaaaggaataaaagaatggctactccatagacagagcagccccgagggttgctggttgcccattgttatggttatttcttgatttagtcttgatttattatttagttatgctaaacaaggggtggattattgacgcctcccctttttagaccatataggataacttcccaacattgccacggcatttgtaaattgtcatagcgctggtgggggtgtagcagtgaggacaatcagaggtcactttcatggccatcttggttttggtgggttttcccgacttctttactgcagtctgttttatcagaaaggtctttatgacctgtatcttgtgccgacctcctctctcatcctctgacttagaatgccttaatttaccgggaatgcgggccagcaggtctccgccttactttacccaggtcctatttaagatggagttgctctggttcaaacgcctctgacagccattctgagttctgtctgcactgttgctttgttggaggagtggaggggctggggagattgtgattcactcaacagccattcactggtttcccttgtatgccaggggtcagtgagcctcagtttctcctcctgctcccagcaaccttgccactcaccccaaagagctaggaagatatttaaaaagaataataacagtcacaaggttgctttcagttcctgccagggtctcagtcttcagaaaagctgaatatgaaaattacttccatgtcattgtggtgccgctcagaatcagaaatatttgacccatcttacagaattagtgcaactacatcaggaacccaagccaagttttgcattcctatttagcatttatatctacatagtccttttcaaatatagaaaagctttctggatgttagttggaacagatagctccatatgtggttataagttggcattctcccagctgggttgaaggagaaatgtacagctactctgccacaacagttatttcatacataaaatcacagccatgattagcaatgatggtgaaggctattcattttatattcagaaataattattgtgaacattcagatagcagcataagtagggagatggactttagtttctgcataaaaagtaacactgtttcaatcctgcagttatgaagcgaggagctgttttggctcttgctgcatgacataccacccaaagctagtgggtacagtaaatgctcatggattctgcagctcagaaagttggacagggaacagcaggcacagcttgtctctgctccctgatgaccaggtccttagctagaaagcctaaaggaacagggactggaatagggaggcttcttttgtttgtttgttttgaaacagggtcccactctgtcgcccaggctggagtgcagtggtgtgatcatggctcactaaaacttctaccacctgggctcaatcgatcctcccaacttagcttcccaagtaactgggactacgggtgtgtgccaccatacccaactaattttattttttttttgtagagatgggactggttgcccaggctggtcttgaactcctgggctcaagtgaccctcctgcctcggtatcccaaaaggaggctctttactcacaagtctagtatccgggctgggatcactcaaaagctgagctcagctggtactgtggactcattgtctggctaacttgggcttccttccaatatggctacccaaggacatttgaacttctcacgtggtggctcatggctccagagtgagcattccagcagacactggcctttacaccccagcctcatttctgctccactctgtcagctgaagcaatcacaaacctgtccagaccctagaggaggagatggagaccccaccctttggtggtggaaggcaggtcaaaaaatttggggccacatcttaaaactgccctaggagcttatggactatcggagcaaattaacagctgacaaagcagagaaatgatccctcagtaaggtgttcaacctgaaatatttccctgctaaaattgtggataataaaattatgacagtaataactttttagaacactttcacatttgttcttacattacagaagttcattctaagaaggtgatagtcagctttgggcaaatctttaatttaatacttcactaattagcatttggccacaatgcctgtttcacttctaaataataataataatttatattaataaacatatccatgcatatttttgagcacttcctatgtgacaggtactgtactgagagttttatacatgttacttcagtatttccccaaattcagatgtttgaaagtggctgtcttaatttttgctattcattcattcaaataatatttattaagcacctattatgtgccagacactgttctaggaattggagaaatataggggacaggacaaaccaactttatggagcttaggggcaaacaaataccgctggtactacttgtattgttttattcaaattatctcttttccttttgtgtgtgtgtgtgtgtgtcttttttttttaagcttagccttgactttatttatgtattatttttattgatttatttattttgagaccgggttatgagactggctaatttttgtatttttgatagtgatggggtctcgctatgctgcccaggctggtctcagactcctgggctcaagcgatccacctgccttggcctcccaaagtgctaggattacaggcatgagccactgtgccctgccagccttgactttaacaataatgtttatgaaactgtgggtttgaggccgggtgcagtggctcatacctgcaatcccagcactttgggaggccgaggcgggtggatcacgaggtcaggagattgagaccatcctggctaacacggtgaaaccccatctctactaaaaatacaaaaaaattagccaggcatggtggcgggtgcctgtagtcccagctactcaggaggctgagacaggagaatggcgtgaagccgggaggtggagcttgcagtgagccgagtttgcgccactgtactccagcctgggcgacagagcgagactctgtctcaaaaaaaaaaaaaaaaaaaaaaagaaactgtgggtttgatgtggcggtggcagatatatgtttttcaatataaatcaaaacaaatgtattaaataaacaaatgctagtgaaataataacaattccttcttcactgccatcctatactctcccggggtttcccgccagcagcccatgtgccgccctttgggaaacacttgtttcatcgccatgcaagctgggaaggagggtctgtggggtttgctgtcctacagaggggctgcatatcccgtccaaggtccacctccgaggggcagggctggcgctggggcctggggctggaacagctcgggatatggcactgagctctcattcccagcctctctctgctgagcaggttcggacactttctccctggcggggtggtgggggggtccctggaccgctagggaagtgcatgtgtccagatgctggcggtgttctggagaaaaagatgggatgccttaacccagacactccttggactggtggtgcaaaaaggagccttcgaatgaggactgggcccaggtgtggcaggccaggtctcactaacgcaggcctccataacaactgtttcagcaccgactgagtggctaagtcaaatattaaaagctgatagagccagtgccctatacaaaagctggaatgtaacaaaagcctaccaagagttttgctcaggcctttcctgggctttaaagcatgacaagataaagaatgaattcttaacaggacccttttaggattaaacaagtttaattgggggtctgaagaaactacacttacacacaggcatatagcttagaaggtatataagctctggaaaactttgtaattttgagttggtctggggacaatttccaggctttcaccctataaccagttacagaaataaaaactcccttttcgctgggtgcggtggctcatgcctgtaatcccagcactttgggaggccgaggtaggcggatcacctgaggtcaggaattcgagacaagcctgaccaacatggagaaaccccgtctctactaataatacaaaaattagccaggcatggtggtgggtgttggtaatcccaactacttgggaggctgaggcaggagaattgcttgaacccgggaggcagaggttgccgtgagccgagacagtgccattgcactccagcctgggcgatagggcgagactccgtctcaaaaaacaaaaacaaaaacaaaaacaaaaacaaaaaaaacctccctgttctcccagtttatctgcatctcatcactgggccatgagaaatagcagcctaatcctcagtttggtccaggaacacaggtgaccctctgtcccatgtggtttgaccaggtaaagggctgtctggggtttgagggtctggagcacccctttgggacactgctttgaagatggagtccccagtgcctaactctgagcctcctccaccagggtggtccgtgaatctcacaggtgcacagtaacgagcccccttgcctgtatgctcctcctccccgtctccccgttcacgtctccaggcgaatctccccttctgggtccagtaacactcctaaatgcctgaccttgactatccaccatggcagccccagccatgccctgcagatgcccacccctgggcccccggggctggccagcagcccacgagtctccccagccacacatcttggccctgcttgatgcacatgcactccgttcctggatgctgtgtgctcatctctaacctgctccaagagaaccagcagggccccatgggaagaggctccctgcatgttcagctgtctgtcagcagcggcccttcaccaagcagtggctcaactttcccactgtggatcgcttgacttgtgcccagccctgctaatgggtggggggttcctccagggtctggcaacccggccccctgggaaagccctggaagatttccatcccctctttcctcccttgccctgcccaccaaccccagacctggcccagcctcaggcagaccggatgggaaccaggatccctgggagacccccaggccccctggaccctcgaacaatggaaggtgagctccagctgccccgtccccaccctggccccacctctgccctggtataagcccgcctggcccgcagcacctgcagccaccatggggatactgtggcttctgctggtgggtgagtaggagtggggactctggaagggggtcgactgtgccacgtgggccccagcccttagctgacatccttcccctcagtcctacagaaccaagtgacttggagcaaggagatcagaggtgagaatggatgtgctccctaacctggagagaggacagggccatgtggacaggcagggagggctccaggggtctgaggagccatggccccaccctggagtccctcaggggacctggagctttctcttggggactgaggggacacagccctgccctggggctctgaggggagcctcagtggtctcgtgtccccagcctcgctcctgtacccctatgggctggagtgtggggatcaggccctccctgcagaggatgatgacttctctgaggagctgcggctgctggagcccttcatgctctttgaagccacacacgggacggcctatgtgagtgccctggccctgaccgtgcggtccctgggctctctctcttctccccaccccactcttgactcggagcctgtctatatctatagctcctggctccttctggcttcgtcctctgtcttcctggggcgggccctgtccctcttctgtcccctgccctgccaacacccccctgcgggtcttgcccttcctcacttcccccagttctgcaccaatgggctggtgtccttcggggagcctgtggctctcttcacactggaggcatttccccaggagatgggccaggccttcgcagtcccgttctgggccaatgggtccacactgagcaggggccagatgtggtaccggcagagccgccagccagagctgccgcagcaggtggcctgagacctggcctcagccttcccccatgccccgcccaccccttgcgccctgctggtggccatgtgggaccaaattccattttacggggcacttggtccccaggtgaggaagcgggtggcagagaagggcccaggctgaggctgtttggcccaaccccttgggaagaagggcttggattcctgggtaaggaggagacaccacggaggagagacggagatgggggaacgagggagagatagagggggcgggaagagagagacagagagacggaagcatggagatgcagcgaggtagagaaaatgggtgagaaagagggaagacacgaacagggagagaaatggcgagagagaggaggcaagacagcaagcgagaggagtgagatgatcagatggagagacagagaataggaaaaggagagagacggagagagagaggggatgagagcagagcagaaaaatcgagactgggggatgtgaaaggaaggctggcacaggtgccagcagaggcagctgtggacatggtgtggacaggggcctgggaggtggcgtggatgggggtctgggatgtggcatgggtaggggcccgggatgtggtgtggatgggggcccaggaggtggcacagctggaagcagccagcttagtggtgcagatggagctcggttgaggactgggcagtgaggagggtcctgggtgcccctggaccagcccacgacaccctggctcctggcgcttgccctgcaggtgaacaccttccaggaggtgctggccctgggcagcggcccctcctgggtgctgtttcaccacaaggacatccagtggaccatgggggtggccagcggtgggagcccccaccacggcctggggggcattgcggcccaggtgagtggggaacccacaggggcctccctgggtccttggggagggtgaggacgcaggtgggctgaccctgttccaaatgacacccccaggcaggcttcaacagcggccgacagagggactacttcacccttcctggctcccggacctcaggcatcctgaatgtggcagacaccagcaatgtgggcatccccaggcactaggccttctgcatcaacagctttgcagtccccaacggctgcacctacaatggtgaagggtggagaacctgccccagacctgcctgctcccagggcccagccacagagcccaggagcccaggccccacactctcctcctccaagacccaggagtccagtcagccctcagtccattccatccttagatccaggaatcagaggccgggcggggtggctcatgcctgtaatcccagcactttgggaagccgaggcaggcggattacctgaggttgagggttcgaggcttgaccaacatggagaaaccccgtctctgttaaaaatacaaaattggccgggcatggtggcacatgcctataatcttagctacttgggagactgaggcaggagaattgcttgaacccaggaggcggaggttgcagtgagccaagatcgcgccattgcactctagcctgggcaacaagagcgaaactctgtctcaaattaaaaaaaaaaaaaaagatccaggagtcagaacccccagtccccaccttcctcaggacctgaggttcaagcctcagccccagacacccccaccgcagcccactctctccacagcccagttcctgcccctaggtgcctctttgtggaacagcagtgcctgcagccaccacactgtgggcaggaaggccgggtgtggtgctggccagagggctgccaggtggggcagcagtgtatgcctgcacaccccttcccacactgctgggcccctcgtggcccctcctgccacctgggtccccagggccacccgcacacactctccagatggcagctgtggctccagccctgccacttcgtcctggccctgcttcctggcatctgcgtggaggtggagttgaggaggggaggcccggtggcagaggccctggtgcggctggtcatccatggctgggatgtggtagtgagatcgcatggcccaatagaacacatcctggtgagtggggctgggagccgggctggaggatagaacccggacagccgtggagtcgcagacacactaagtgcccacagccccagagactgccacagagactggcgggcagagtcaaatgttagatggacaggcaggcagacagacagacaaaatgaataacaggcagagagacggacaagaagacagaccagctggccaatggacaggaagacaggagggttggacaggtggacaggttgatggaaagacagacagagtgacgttgggatgaccagagcaggtggcaagacagacggcagaagggggctagatggacagaaggacacatggcgagcagatggcgaagcacttggtggactcgctgaggccgacgatggtcgcaggcagacagagcctcccgggctctcatcctagccatggacctcacattgcccaccgatgcagccctccggggcctcagcgccacctgtccccttgaccccacctttctctgttatacaacccagtttctgccgcccaccctctggtttcctgactggttgacctcactggccgccccatctgctgagcctactgagcctacggtgcttccccacttcttaccttctgggacatcaggctccctctcaaatccctgcttgtctacactcatacctcctgcgctccttcctccaataccccacaggtgaaccacacctctccacttgcactcacccctgcatgtaggcagcagagcacacctgggctggtgtcgtacctgtgactgtgaacttgaaaggaccttccttccacctccctggcaccctcactcacctcctctccctggccacctgttcacacctactcctctccctttagaccaaacctcctccctggaactcattctcagcctatgagatcgcttcctacttcactggtagcatcagctggaacctgccaggcactccccaaccctccacctacagtccaggctgccatgatggagggtggtctgtgctccttcctggcttggccacctctgtgacagttcctgcatctcccagcaatgcttcctctccctctcctctatatccgtgcttctcaaagtgcagctattagaccagtagcatcagtagcacctaggaatgtgtttgaaatgcaaattcttgggtcccacccaagaccaccactctgggtgggtacatgcaatctgaattttttttttttttttttttttgagacagggtctccgtcactcaggctggaatgcagtggcacgattttggctcagtgcaaccgcctgccttggcttcccaggataatgggattacagggagtgcaggccagcactcctggcttgcagtctgtttttgctagcccttccggggattctgatgcatgctgagctccaatgagcttcaccatcaatttgctatttttttttttctttttgagacagagtctcgctctgctgaagtgcagtggtgcaatcttggttcgctgcaacctccgcctcctgggttcaagcggttctcctgcttcggcctcccaagtagctgggattacaggtgtgtgccaccacgcccggataatttttgtatttttagtagagatggggtttcaccatgttggccaggctggtctcaaactcctgacttcaagtgatctgcccacctcggcctcccaaagtgttgggattacagatgtgagaacctgcgcctggccaatttgcctttttctaccagatccttctcactgcattccaataggctacaattttgccatcttcaaaaacctttctcctcaatccttcctccgcctctagccactacctcatttctcacataccctgtacaagaaaagcacacagaagagttgtcaggctcactgcctccaatgcctctcttctttctttgagagacagggtctcattccatggcccaggatggaatgcagtagtgcagtcatggctcactgcagccttgacctccaaggctcaattgatcctcccacctcagccttctgagtagctgggaccacaggcgcacatcaccacggctggctatcagttcctctcttttcattctctctttcggaccttctctagtcaggctttttccgccttcaacttcatgcagccaaaactactctcgatgaggtccccccaggacagtagtcaatcttcaggccacatcctgattgaccgccagttatgtctgacacagccctgtccctcccttctccatgagacactcttcccaatttccaagaccccacattctcccggttctcctccagccatgcgtccccatcagcccacacgctaaacactggagtgcccagggctcagcctgccctcctctcctccccaccttcacccattcctgggcactcacccaggctttctgatggaaacacaccaatcttctcctacttttcctcttaagaattttacctgaccgggtgcggtggctcatgtctgtaatcccagtgctttgggaggctgaggtgggaggatcgcttgagtctaggagttccagaccagcctgggcaacgtagtgagaacccatttctacaaaaattttaaaatttgccaggtgtggtggcccgtacctgtagtcccagctatgtttcagagcctcatggcatcttctccttcttgctgacaagtgcatttctatctgaatgcctctcgctgggaacctgcgccatcacactcaccccatgccaaggccccgaccccacagcagggccacattctgcacctgggaccgcaggagctgagccccaactgccgtgagctgtgtgagtgcaaggaggctgggcagccaccccactgcagcccccaggcgtgtgaggacggggaggcctgcttcctgctcaccggggcctggtactgtggggtccggagaggtagcagctgggtgtcaggtgacccccattaccacagcttcaacagcacagccctcacagcccagggtgcctgtcactatgtgctgagccgcacctgtcaggccggcctgagggcacaagctttcacagtgtgggtggacaatgagtacctaagtcccacggccctcatgactggggctcggccgatcgaagtggacgtgcacggggtgaaggtgatgatggaggctcagacccccgggagggcacaggtgagcttgggcaggggctgggatcaggccccagaagggcgggcttagactcaggaatccggggaggacccattcacatcctaggaagacttgaggggacacagcctcaccccaaaggttctcagggattcccagacccacctaggggtgtttgatgtggacatggccccgggtgtgtctccaggttaacaggacccaggcccacctgcccctacgcctggctggcggccaagtgcacgtctatttcagcgattctggggccatgctggagactgacgctggcctcttggtctcctacgactggagccaccatgtatccattatggtgcctgagtcctacgctggcaccctctgcagcctgtgtggggacttcaacggggacccccatgatgacttccatgcccctgatggctccctcctgcctgacccggaggtgtttgcactcagcttgaagggcctggattccccagccagttgctccaccgtgggcactgcccctctgtgcccccatgaccgagagggccggtaccagtcactggctttctgtgggctgctgggtgcccacgatgggcccttccaggcctgtgatgagctggcccaggcccaagtccacatggagaactgcatccgtgacctctgtgccacaaggggttcccggcagatcctgtgcgaggctctggggagctatgtccagcagtgccagcagcacggcctcctagtgaggccctggagacacctggtggactgcggtgagtggcatcctctccatgccagccagcacgttctgccggccaggtccagaaaaccagttccgcccattttgtggggttgcataattaatgatctcagagtagctacttcaggcctggcccagtgaggcgctcgacatcactggccttggtttcatgcttcccaccaaattggctccacatccagacaggctcaccctgaccacagtggctccacaccttgcagccactcaggtttctcagcccagcaggaaagagagctccgtgggtctcagaagctccagcatgatttgcactgcgtctctgtggcttcaactgactccttcttgtacctctcactgtggccaggggaatgtgagtctccgattgacttctgcctgaccgcgggctctgcccttggggagactgcccaggcagaagttgggatgaggttagcagtgggcagtagtactggctggtgcccaaaggacaaatgtctgcggcctctcacccttgtcctgctgccaagtgatctttgtcaagagcattaagcagtctttcaaacatttttgttggagacccacaatacaaaatatagttcatttcaggatctaattctattagttttctatctcttgctgctgtaacaaattgcaacaaactcagcagcttaaaataacactttttttttttttttttgagacaggatctcgctctgtcacccaggctgcagtgcagtggtgcaatcatggctcactgcagcctccaactcctggctcaagtgctctttctgcctcagcctcctgagtagctgggactacaagcatgcaccaccacacctggctatttttaaaactttttttgtagagacagagtcttgctatgttgcccaggcagttctcaaactcttagtgtcaagcgatcctcctgctcagcctcccaaggtgctgggactacaggtgtgagccactgcacccagctaatttttatttatttatttatttattttgagatggagtctcactctgttgcccaggctggagtgcaatggcgcgacctcagctcactgcaacctccaccccctgggttcaagcaattctcctgcctcagcctcccaagtagctgagactacaggcacctgccaccacagctggctaattttttgtattttcagtagagatggggtttcaccatgttagccagatggtcttgatctcctgacctcatgacctgcccaccttggcctcccaaagtgctaggattacaggcatgagccacccctcccggcccaactccagctaattttttgaaaatgttttgtacagatggggtcttgctatgtcaaattttttcttacaattccaacacagttctcgctggcctaaaaatcaacgtgtctgcaggagtgcatttctttctggaggctctaggggagaactgtttccttaattatttaaattgttggctgaattcagtttctgatggctataggactgagggccctgtctctctgctggctgtaacctgagggttggtgtctacttctagaggccacccacattccttggctcatggccccttccatcattttcaaggccactaacagcaggtcaagtccccattatgcttcgaaatcccctgcctctttctgatggactctctggcctctgtctcccacttttaagagcccacgtgattacactgagcccagccagataatccaggttaatctctcccttcccaaggtctagaaccttaatcacatctgcaaagtccattttgccatgtaacgtatcacaggatacagcgattagactgtggacatctttgaggggctgttcttcagctgaccacaccaatatatgcatacacagcacacaaagtgtcaccaaataggaaaatgcactcaatactttgcattacattcttttctattctatttcatttttcaaagcagggaattatcccactgatctgtatagcattgagattgagaacacagatcccaaagtcagcctgccttggttaggatgccagtaccaccactttcagctgtgtgctcttggggacgtcacttaacctctccgtgcctcagtttcccctttaacaagagaaagaatggtgaaaataacacttctcttgtggggttgttgtgagagccaaacaaataaacagtagctggcaatatagtgaatatagtgaatgctctacaagtattagctgtcactatgaaattgattttttttttgaggggggatggagcctcactctgtcacccagactggagcacagtggtgtaatctcggctcactgcaaaattcacctcccgagttcaagcaattctcatgccttagactcccaagtgtctgggagtacaggagcatgccaccatgcccagctaatttctgtattttcaatagagatgggattttgccatgttggccaggctggtcttgaactcctgacttcaagtgatccacctgcctctgcctcccaaagtgctggtgagccaccgtgcccagcctgaaattgacttttaacctgtgttaacatcactctgtcctgagatcaaaaccacagggctctgctgttggcaggtcttgtcccagagtctgggtcagcctgtcctggggagggcctgggatcagcccggcccacaccctctccagtccagcaggcagctgagatgggtcctgagccatctttttatccctttggtgtgaatgggacaacgcgaccatttcacagatgaagagcagacacagagccgcacagctggggagtggcagggaggggtccccctgggcctgatcttgccctgggtgatgcaggggccagggcaggactgagaagtgccgggtctctgacctcgtagggcccacacgctgccagggtggccgagtctgtggtggggcagccacggcagagtgatcagggctcacatgagggaagcgtagggccacaggggagcacagaggaggggctggcccagcctggaaagtcaggccaagtttcccagaggaagggccacgagagctgaggcttgaatgacaagtcaaagccaataggtaagcaaggagaagccaaatgttctagggagaaggaacaaggttttcagaagcccagagactgtgtaaatttgagccagagatgggggagcctggagagagacatggtcctgggctgtgtctgtggggccttgaatggcaggcaagaagtgaggactttatcccgaaggactgggcctctaacctccaggaccccaaggcgcaactccttttctctgcccctagtccctcactcctctcagagcaggaagcaagttcagcatcttgcaaacaaaacctctctttgtccaaaggaaacagcccattgcaagctccgaaggccaacacaagggactggtggtgggtgctctggcctctggcctgcctggcccacccctcctcccaaagccagagacaagccccgggggcatcacacactttgactaaggttaactgaacacccactaagtgctaggcagcattctaggcgctgcagacacagcagtgacccaaacagacaaaaccttgccctcatggaggcgacattccagtggagaagacaatcagtcaacccagccagtaagtaggtgattaaacagtaagtcaggcggggcagggctggggagtgctggagaaggggcatgcagtattaaactggggggttagggttccctggggtgcagagaggtgccctgggagtggagactgaaggtggtggaaaagggagccgagctggctgggggagcggggaggcggggggacattccaggcagcaggaatccaggaaacccatccaggaagggtgcaggtgtctcctccagcccccagactctgggtgctcaaattaagatgaactttgagctggaatatctcccacatcccacccaggacatttctccttttctgactttctttattaatcctgagactgggggacacccccactccgccagcgcacacacacacacacacacacacacacacacaaaaccctccccagcaatctctcctccagtatgtttttcccctgatctgtgaaacccccaaagacaagggttagggatggggtctctcttggtcaccagtgtgtcaccagaacctaccataaggcatttaaaagcataggttagggctgggcacagtggctcacacctgtaattccagtactttgggaggccgaggtgggtggatcacttgaggtcaggagttcaagaccagcctgaccaacatggtgaaaccttgtctctactgaaaatacaaaaaaaaaaaaaaaaaattagctgggtgtggtggtgtgcactggctgaggcgggaggatcgcttgaacccaggtggaggtggaggctgcagtcagccaagatggtgccactgcacttcagcctgggtgacagagcaagactctgtctcaaaaacataaaaaaaatgaaaaagcataggtcagatctcatcagattcctgattaaaagcatccctgggtcccccttacctctgggatgaaaactgacctccaagcctcctcctaagaggcccccacagcggcctctctctgctcaccctgcctcctcctacactggctttgtctagctcactccacaccgagggtccagccacactggcctctctgctgtccctggaccacgccaaatgccttcccacccctgggtctttgcatctgctgttcccccggcctggaatgctctttcccagacgtacacacggctggctccttccatcattcaggcctcagctccaatgtcacctctgcagagaggcctccctagccactgtcctcaaatcagcccatggggctcagccactctgcgctacctaaagctgggtaacacagatctaacccagtttctcaatccaaaattatcttttatttattgctagtttgtcgcccatttcccccctctagaataggccagcacacttttatgataaaaggccagataataaatattttaggctttcagggccacactctgccacaactactcaaagcttctgttgtaacataagaacagtcatagacaatacacgaaccggcgagctggctttcatgaagacattatttatagacaccggaatttgaattttacatgattttcacacctcacaaaatttcctcttttggtttctttttttctaaccacttaaacatgtaaagactatttagattgtaggctgtgccaaaacaggtggagggccagatttgggcccaagggtgaagcttgtcaacgtctgccctagaacatctgttttatgaggtcagggatctctgtcttggtcattgctgtgtccccaggccctgggatgttcccggcatgtagtggatgccaaagttgaacaaatatgtgctatagaaaaggcttcgacacattcattaattcttccaacaaatatccattgaggtttgccgtgagctgggctctggggagatagcagggaacataatttgaacgtggggcagtgagttgacatccttgcattgaatgacttgtgttcctccagagctgacctggccccccgacagccactacgagctgtgtggcttctcctgtcccagctcctgcaccgagcctgccctgcccgacagctgtctgacaccatgccaggatggctgccagtgtgacccaggatttgtgctcagtggcacggactgcttgacccccatccagtgcagctgctccatggggggcagataccacctggccggggagccattctgggctagggagcactgtgagcaattctgccactgcgaggcttccacccatgctgtgtgctgctccccctcctcctgtgggccagggcagagatgtgggaccctaaggggcatctttgggtgccacccattctcccctggcacctgccaagcagccgggcactcacacatcatcacctttgatgggaaaactgttgagttctcaggtacctgtgtgtccgtctttgccgaatcctgtggctcttccggctcactgccattcttcaggatacagctgtgaaaggagaacagatccagcagccccctcatgctcatcttggaggtgtctgtccaggttaatgggacccaggtccacctgcggagggacagcccaggcatggctcagataagcaccagctttgggacgtgtcgtttctaggaaccccaacccttcacccaaacccataggcccaagggaaaaacttattctgtctccattatttctacattttacctctattttctgattatatgcccatttttgactatatccatcagatgcattcagctaatataacagaaacactctcagaccagcttaagaaaaaaaagaattactgatttacacaattgaaaaaaaaaatctacaggtgtatggattcaggcatagctggacccaggtgcttgaacaatatgtctcaaatctgtctcaatttctgggctctcctttccttcattttcagacaggcaccatcccatcccaccttgtagggacaaggacagctgccaggttagcaaatgtcactggaggaaaagtgtccctcactggcccagcttgagtcatgtgaccacccctgaatccctgatggactagctgattggctgggcctgggtcatgtgctggaagttaggataggattgactttctgtgaaccacatggattgattttggaggggtgagttctcagggaaatccagagaaaggagaaatgaatgcagaacaggataaaacaagagatggtcactattatagttatgtccttgttccttcatctaaaaatgttttacatgtattggtacggtggcttacatctgtaatcctaacactttgggaggccaaggcaggtggatcccttgagcccaggagttcaagaccagcctgtctcaagcaggcaatatagcgagaccccgtatctaaaaaagaattaggtgggtgtgttggcgcacgcttatagtcccagcttatagtcccagctacttaagaggctgaggtgggaagatcgcatgaacacaggagttcatggctgcagtgtgccatgattgtgccactgcatccagcctgagggtcagagtgagaccctatatcaaaaaaaatcaacatttttcacgtatttgaacacctactatgtgccaagcaacactgacccaactgtggtcctatgctcccgagccttcctttgattctgcctgctccttaggtgaatggtgagacaacagccctccccgtaagcctgaatgggggcagccttgccgtccactggaatggcctcttctccctgctgcagtcagactttggcctctggctcagcacagatctcacctacagccttaccctcaccctgccccacctctacaagggtcacacctgtgggctctgaggcaacttcaactgcaaccccagtgaggacgctaaggctgacattaccttggagaagcagagcaaggcttgtagggacagctgtggggctgcctgtccagtctcagtctgcaatgaccaggggcagattgtgtcagccaggaggcagtgctggctcctgcaggacccccaggacccttcagccactgccactgggagatcaacccagacccatatgtttccagctgtgtcgatgatttgtgtcttgctggggatgatgaccacatcctctgcctggccctgcagacatatgccgccatctgccagggcgccaacatcaccatcaggcactagaggaattcttccttctgtggtgagtcatggttgagcagggcaggaattcatctgcatgctctgtatggccacacacagactgacatccttctgtactcctgggctgcctgagtgccccaaccacttcccatattcccaattccagcacaggaaggccttccaggttctcctcctaggctccagctggacgcatgtggattggtagggggcctgtatgctaccgactgttatgtttttttttgttttttgttttttttgagacagagtctcactctgtcacccacgctggagtgcagtgacttgttcttagctcactgcaacctcctcctctcgggttcaaactattcttctgcctcagcctcccaagtagctgggattacaggtgcccgccatcacgcccagatgattttttgtatttttagtagagatggggtttcaccatgttggccaggctggtctcgaactcctgacctcaggtgatccgcccacctcggcctcccaaagtgctgggattacaggtatgagccatggcacccagcccgctatgtattttgaataccaccctgggttgactggatccctggccccctgtcaaggggatgtccttttccaccctcagaatgcctgacctgagatgccacaataataatcccaacaactgctaatacttattgaacatctacaatgtcccaggcatggggccgaaggctctgtgtacctcttgccgccactgtctcagaaacaccctgcaagtgagaggcaatgactgttattattcccactttacatttgggaaaacagaggctcacagaggtaaagccatttgtctactgctaatcacaacagacagagttgagacttgaactaagactttctttctccagagacaaaagaagttttattactagccatatcatctaattctttctttcttatttaactattatggaaaatttgaacataaaagtagagagaatagcctattgaatgcccctgtacccagaaggcagcctcaacaacagccaagttgtggccgacctgtgtccacctccacccctcccttattgatttattttgtgtaaagcaaatcccagacaacgtgtaaacctgtaaatactccagcattattttttttaatagataaggacttttaaaaagaaaaaaacctgctgtggccgggcgcgtggctcacgctcacacctgtaatcccagcactttgggaggtcgaggcaggcggatcacctgaggtagggagtttgagaccagcctgaccaacatggagaaaccccgtctctactaaaaatacaaaattagccggcgtggtgctgcatgcctgtaatcccagctactcgggaggctgaggcaggaggatcacttgaacctgggaggcggaagttgcggtgagctaagattgcgccattgcactccagcctgggcaacaagagcgaaactccgtctcaaaaaacaaagacaaaacaaacaaacaaaaaaacctgctgtgatttgctcacacctaacaaaataagcagtaattcccagatatcatgaaaagcctagtccatgttcagatttttctgatcgttcctaaaacatccggctttcctcccttgcaccaaagctttgctggcccctaatgcttgcccattaagggttcctagctggttccaacattaggggcgcaatcggggcaggtcatgttctacggggtgggggtggaaggtgccgctttcttgctcaaccaacaggcaacaaaagcctgtccgataccatcctggggatcaagacacccctaaaaccaggttctaacccacctatgttagatccaaatgtgaatctctgacacctgggccgtagggaaccctcaaagggtttggaatagggaaggcggggagcggggtggagtgggggggaggtaagacagtgttcatggagtgagaaaggtgggccacctaggggctatttctggaataacaataggtcgcatttatccaaggttcccagggtgccaggcgctgtcccaaccacttaatttattttaacttgcttaaccctcaaagtcagtttgaggtcagtactcttttcggagagatgggtacggagtcctggagaggttaagcaccacgacagagccgagattttaagcactcggtcagggagttgggcaaatgtggcctgcagatcatgtttccttacccgcgctttttctcctccctgcatagccgccacgtgtcctaagcacagcagctaccagcaacgcttggacccgcgccgggtgcagctctgcgtccccgcggccgccctgcctgctccgagggctgcgccaacgataacgcgcacctgtgggcaggggccaggtgccggcacccgaaggagtgcggctcggcgcacggcggcccctcctaccaggtgagctgggggcagggtcttgctgttgtgagggggtcggcccatcatggcggtcagggagcccccaaaacatgccagggatgggcgcccaatccgggacacctatattcaattgtgcggatggcacattgtgggttcacaatgtgttgacctgctttattattgatgattccaatactgctactagttactaaggtcattccctgtgtgctaagtgcttaataatattattattggctgggtgcggtggctcacgcctgtaatctgagcgctttgggaggccgaggccggcggatcacctgaggtcaggagtgtgagaccagcctggccaacacggcgaaaccccattctactaaaaacacaaaaattagctggatgttgtggtccacgcctataatctcagctacttgggaggttgaggcaggagaatcgcttgagcccggaaggaggaagctgcagtgagccgagaaggcgccactgtactccagcctgggcaacagagcgagactctgtctcaaaaaatatatgtattattattattactgtcagcactattgactttttaaaatattagccatcacttattgagtgcatagcccccactacacactttggcaatgtaatagtagtaataataacaataatcaaaacagctcattttatttatcattaataggtacaagactctgtcctaaatgttttagcattgtggtcagtgctattttttgtttatttttatttttttatttttattttatttatttatttatttttttgacacagggtcttgctctgttgctggggctagagtgcacgggcgccatcttagctcactgcagcttcaaattccctggctcaaatgatactccccctcagtcacctgagtagctgggacttcagttgcgtgccaccatgtctggctaatttttaaattttttgtagagatgaggtctgaccgtatcgcccaggctggtctcaaactcctggactcaagggatccttctgcctcagcctcgcaaagtactaggattacaggcatcagccaccacacccaaaccatttgtattattttgatggccaacatttgagtagtgatcacacatcaggtcccatactgctaataataataattaaaatgtggccaggcgcggcggctcatgcctataatcccagaactttgggaggctgaggcgagtggatcacctgaggtcaggagttctagaccagcctagccaacatggtaaaacccagtctctactaaaaatacaaaaattagctgggcgtggtggtgtagcaggacgagctgcagacaaaacccctcagacactgagttaaggaaggaagggctttatttggccaggagcatcggcaagactcacgtctcaaaaaaccgagctccccgagtgagcaattcctgtcccttttaagggctcgcaactctaagagggtccacgtgagagggtcgtgatctattgaacaagcagggggtatgtgactgggggctgcatgcaccagtaagaacagaacagaacaggacagggattttcacagtgcttttctatacaatgtctgtaatctatagataacataactggtttggtcaggggtggatctttaactaccaggcccagggtgtggcgccgggctgtctgcctgtggatttcatttctgtcttttggcttttacttctttctttggaggcagaaattgggcataagacaatatgaggggtggtctcctcccttagtggcaggcacctataatcccagctactcgggggctgagacaggataatcacctgaacccgggaggcagaggttgcagtgagccgagattgtaccatcgcactccagcctgggggacaagagtgagacttcgtctcaaaaaaaaaaattttaaatgtattgggggctgggcacagtggctcacacctgtaatcccaacactgtgggaggccaaggtgggcggatcacttgaggtcaggagttggagactagcctagccaacatgtcaaaaccctgtctctactgaaaaatacaaaaataagccgggcatggtggcacatgcctgtagtcccagctacttgggaggctgaggcacaagaattgcttgaacccaggaggcagaggttgcagtgagctgagataacaccactgcactccagcctgggtgacagagcaagactccatctcaaaaaaataattaaatgaataagctaaaatatattgggtatttactttgtgttcatgcctgggctaagcattttatgaatagtaataataataataatggctaatatattaagagtttgggcatttacaatgtgccttgtgtaagcatattaaaataatggtgatattaacaataataatggctggtatgtaccaggcatctgctgtattgctgtgctaaccagttaatgatatataatgataaccatcgtgaacatattttggtcatttgctgcgtgtgtaatcctgtcatcgggataaaaggtaatattttctgagtgcttattatgccttgagcactgggccagcatgttattaataatggtatcagatatatgtcaagaacttggttactgtaggccagctgggtggtgagagcctcatgcgtatgaccgcactgaccttcaaacagccctttgattgcctccaatgtgcagagggggaaactgaggctacaggatgcacagagatctcaagggacagagctaggtctggactccaggtctctctgaccccaaaattgtgctgctaatcactaggctgtgctttccactgagagaaagcaggtgtcacaagtttgctgccctctgggtaaggcagtagcctgtcatgatggtcagacccccagctgttgaatctgggcatggcattcctgcccatcccatgctgagccggcccctgagcctctgctcttctgggtcagctgccaggccagcctcgggcctccaccaggccctgtttgggtccacctgggctgggctgggcagggcatgctgatctggcctccgacctggtctggctgaaccgatgcacccgccgctgcagctgtgacagaacggggcatttccgctgcagcccggcgtgctgccccactgggaagatctgtggtctgcagggtggccagctgggctgccagagccccctgggcacctgcatggccactggagatcctcattacttcaccttcgatggggccatagcccacttccagggcacctgcacctaccacctggcctatgccatccatccattcatccatctatcatccatccactcatccatccttccatccattcatccattcatccatccatccatccatccatccatccatccatccatccatctatccactcatccatccttccatccatccactcacaaaatttttctgagtatctactttgtagcaggccctgctgtaggctctggagacacagcaaagaacaaaagagacaggtctcttctctcctagagtgcacattataatagtgagagacaaacagtaaaaaataaatacataatatttcagatggtgataagtcctagaaaaataaaactagaaaggagaatcaggagtgcttgtgagtatggggtgggagttataatttttaaacagggtgagcaggaaaagcctcattgaggaggtgactttggagcagagacttgctggagggaaggagaagccttatgagcaatgagggaagagccctccaggcacagggaaccttaggtgcaaagtccagacgcagaaatgcccttagccttattaagaaagaacagggtaattccagcagtttaggaggccaaagtggatcacttgaggaagttcaaggccagcctgggcaacataggtgagacccccatcgctactaaaaattaaaaattaaaaaattagccgggcatggtggcacgtgcctgtagtcccacctacttgggaggttgacttgggaggatcacttgagcccaggagttggaggctgcagtgagccatggtagtaccactgcacttcagcctggaggacagagtgaggctctgtctctaaaataaaataaaataaaattttaaaaaagaaagaaagaggctgggcacagtggctcatgcctgtaatccaaacactttgggaggctgaggcgggcagatcacgaggtcaagagattgaatcctggtcaacatggtgaaaccctgtctctactaaaaatacaaaaattagatgggggtggtggcacatgcctgtagtcccagctactcgggaggctgagacaggaaaatcgcttgaacccaggaggtggaggctgcagtgagctgagatcgcaccactgcactccagcctgggtgatggagcaagacaaggaaggaaggaagggagggagggagggagggaaagatgaaagaaagaagaaagaaagaaagaaagaaagaaagaaagaaagaaagaaagaaagaaagaaagaaagagaaagaaagaaagaaagggagagagagaggaaggaaggaaggagaaagaaagaagaaaggaaaggaaaggaagaaggaagtaaggaaaagaaaagaaaaggaaaagaaagaaaagagaaagaaagaaagaaagaaaagaaagaaagaaagaaaagaaagaaagagagaaagaaagggagagagaggaaggaaggaaggagaaagaaagaagaaaggaaaggaaaagaaaggaagaaggaagaaggaaggaaggaaaagaaaaggaaaagaaagaaagagaaagaaagaaagaaagaaagagagagagaacagggaggccagcggccagtgtggctggagtggagtaaacccggggagagtaaggggtgaggtcggagcgttaatggggacagatcctgtagggccttgtgggtcactgtaaggactttggctttcactcagaatgggttgggagttccagggatttcagggagggctctgagcccaggaggcccctgatctgactcaggtgtcagcagatccctctggcttcatgcagtggacagatggccgaggacctggggggagcaggtagactggagaggaggctgacagaattgttcaggcagaacgtggcagtggttggaatcaggaagagggcagtagagggagtgagacatggttagattctggaaatattttgaaaggatcagctgtgggatgagagagagggcaggttccaacatgatttggtttttggcctccgcgtcctggacaagctgccactgcctgagatggagaaggtaggagaggaagcttggggtaagattaggagttcagatttgaacgtggggagttcgaggtgcctcttttctcccagagctgggacacagcaggatgcagacacctggagttctaggactggtgagggcatttgggaattgtcagaatacagctggggtttaaagccaggcaagtggatgagaaaagtaagggaagggaaacgaaggggaaggggctaaggtgaacttggcagtgtgaggtgtgaggtccttggtggcatggagcagacagctcggcttggagattcatacaccttacctgctgtggggtcatgaggagtgtatggatggcactagggggtgggagatggtagggggaaatggatcctgagctcttcccctgcactgcaggtggacagccaggcggtaagcagggcctggtgctcctgcaggtgggcacctggctccaggtacagttcaatggccacaatatgctgttggtgtgcgtggggcctgagttctggagccacctctgcggactctgtggcaacttcagtggcgaccccagtgatgacaaggtgctccccagcagggtgcccaccctcagtgatgccatctttggcaacgcctggtggacccaggacagccggcctgggtgggtggctgcctgggaccaggaagggcccgggttgggagaaatacagggctcagggaaaacagtgggcagacaggcaggctttgagaacagaaaggtggaagaagagggtgtgaattgcacacacaactctcaggagattgattcaggtagaatcaggaacaatgattataccctttcacggatggggaagactgaggcatggaagggcgaagcatctgcccaagttcccacaataagaaatgatggaacgggccgggcatggtggttcttgtctgtcatcccagcattttgggaggccaaggcaggaggatcacttgagctaaggagtttgagaccagtctgggcaacatagcaagatctcgtctttattaaaaaaaaaaaaaaaaaaattagccaggcctggtggtggtgcacacctgtattctcagctacttggaggctgcggcaggagaatctcttgagtccaggagttcgaggttgccatgagccatgctggcaccactgcactgcatcctgggtgacagagcgagaccctatcaaaaaagaggggaaaaaaatggtggaacagggatttgagtccaggcattctggcttcagggtccctgatcctaaatactccacccccccacctctcacaggggaaacaggaagcactcctcacagagaccttatttatttatttatttatttatttatttttgattcctgctccgtcgcccaggctggagtgcggtggcacgatctcggctcactgcaacctccgcttcccaggttcaagtgattctcatgccttagcctctcgagtagccgagattacaggcacacgccaccatgctcggctaatatttatatttttagtaaagatgaggtttcaccatgttggccaggctggtcttgaactcctgacctcaagtggtctgcccacctcggcctcccaaagtgttggaattacagccatgagtcaccgtgccagtctcccttcactgagaccttagtcctgcaaagtccaatgcaccaaacacacgtgctatttaaatttatgtgtaaattaaattaaacatcttctgtcacactacctatatttcaaatactcggtagcctctggttgctagtgcctgcggtattggatggcacagacttggggattcgtccaagtagcagagctgggatctgaagctaacaaagttggttccagaatccaggatctaactaataactatcctggctgggcgtggtggctcacacctgtaatcccagcactttgggaggccaaggtgagcagatcacctgaggtcaggagttcaagaccagcctggccaacatggcaaaaccccgtctctactaaaaatgcaaagattagccggctgtggtcgtgggtacctgtagtcccagctacttgagaggctgaggcaggagaatcgcttgaacccgggaggcagaggttgccaagagctgcgatcgcgccactgcactccagtcagggtgacagagcgagactctgtctcgaaaaaaaaaaaaaaattaatgactccctcatgttgagtaactgtatgaaaatcatttgttactatggggttgaggtttttaaacgtgtctaaaactgcaccaggagctgtcagctgctgggagggagaacctggtgcgggcagaggaggactagccaagggtggccaggggggaggcaggaggaggaggaggcttggaggtggtggtgttgagtcctgtgatcccccagctgccggcgggaccctggtggcgctgagccctgccaggacaggccccgggtggagcagctctgcagtgttctggcaaaccgctccgggcccttggccaagtgccactggtatgagagccccgtgtcctacacgcaggtgtgtgtctctgacctctgccagtatggcacgggcaaccgcatgctgtgcaccatgctggaggcctacgtccaactctgcgccctgcgctgcgcgttgcctgcccgcgtggcgagccagcctgggatgcagttacgtgctccttccctttcaccgcccccagctccaacgatggcctccccacttggctagctaggatgcctccttcgccggtggatcggaagccctcatccccagggagaccccagccctgcctaggatgttaacccaagcttcaagccagaccagggctcctcttgggcccttcctaatcctacctctcacctcccagcactggaccctatattgtccgagttgctcactgtgtgctgcaagtttgaagtggcctgtgggtgtgacatgcataacaaaccacgtggttaaaagtttcatcggaacaatcgggaggctgcagtgagctgagatcatgccattgcacttggcctgggcaacagagcaagaccctgtctggaaaaaaaaaaaaaagaacagtggcagtttgggaatcgtcctgtggttcattcctgcccttccctcccctgcactcaccctgatttttttctccctctaattgagggagcaaaggtttcagggttgtggcctctgggcgatctttcccctcccccaggtgtggcgtgtccagccaacagctactatgactcctgtgggccacccttcccggccacctgtgctagcctcaactcctccgcgccctgcaccctccagtgcacagtgagctgcttctgcctcgagggctttgccctggaggcgggcatcttcggtgccccacgcttgctgcggctgccacctgcagggccgctatatccgcctgggtactgaggtgctgcctgcagccccctgtgatcagaggtgcgtgtaccatggacctggacgcccgctcgagtgccaccctcatgcctgcaggccctgtgagctgtgctgccagcacaggggtgtctggggttgctaccccatgcactacgggacactgtggctgtacggagacccccacctgcacactttcaatgggacccaccatcaggttcaagggcctggctgggagatattggctagaacatgccggccacaccacagcgcctatgccatctgggtggagatcaggcgccaggagccgtgggatgccatgtgggcccagcaggtggatgtggatgtggcaggatggcagctgtcactgctggcaggacagtttggagccgtccaggtacttgtcacccagctctggtcctgggcctccaggaactctagtgagtaatgagcgtgaagaacagcaacgccgggcgtgggagctcacgcctgtgatcccagcactttgggaggctgaggcaggaggatcgcttgaggccatgggttcaagactagcctggccaacatggcgaaaccctgtctctataaaaaatttaaaaatttagccacaagtggtggcacgtgcctatagtcccagctactcaggaggctgaggtgggaggatcatttgagcccaggaagtcgaggctgcagtgagctgagatcacgccactgcactctagcctgggcaacagagaccccatctcaaagaaaaacaaaaacaaaaacaaacacaaacaggctgaagaaatggtggtggcccaagggccttccctttggagaaagagctactgggacctttagaagtgggcagagggccccagccctgagcttcagaggatccacccgctttggcctcttctggctgcgtcccactccgtgggctttggagtcctctgggaaacgcccctgacccctagagcctggagcctgcatggccctccccttccagaccgtgctccaggaatgggaattccctgcctaaaaggctcagagctgcttccagggtccacgctggccttgtccccaggtccatcctcacaagagtggaccatgcggcccacatgacgcattctaggcagcattgcaggaagccagtgtggacccagctgggcagagcggcccaggctagatgtacggggatgcagtgcctcttgcagtgagggccagagctggggctgcacagagaagagacgggcccagggcagtctctccttggatgccagatcctgtccaggaaaagttggaaattctgattttgcacctgaccaccaggacgctagggaggtttatgcatcaaggcaggaggatagaccgtattccatgtaatagtgtggcagcttggtttgtaatcttaaacatgaagatgtgtaaggtgtgtgcctccatttctactcttgtctgggcccctcagggttgatgggtgttgggtccacctggggttcggtggatgctttagctggcaacgtggtaacacggtgaagcctgtggtgatgggcccaggggaccaggactgagtcccactgtgccatttgctagctgtggaactggacctagtggctttacatctctgtgcctcagtttcccatctgtaaaagggaagtgaatggtacctacctgtatgtgaggattaagaggtgtgaattgtctaggagaaggcatttagtaagggcataaaagcatttgatcaataaataacacaggtgaggtgtgatggctcatgcctttaatcccagcacattgggaggctgaggcaggaggatcacttgagcctaggcaacatagcaagaccctatctctatttaaaatttacatttaaaattaaaaaataatagtaaataaataaaacatgtaactgcaaagtcaagccaacgttgtaccactagtgctgcatccccacccccagcaggcagagtaaagttgtagtctttaaaaatctgaggccgggcacggtggctcacgcctgtaatcccagcactttgggaggccgaggccggcagatcacctgaggccaggagttcgagaccagcctgaccaatataatgaaacccgtctctactaaaaatacaaaaattagccaggagaggtggcatgcgcctataatcccagctactcgggaggctgagacaggagaattgcttgaacccaggaggcagagtttgcagtgagctgagatcgcagcaccattgcactccagcctgggcaataagagcgaaactctgtctcaaaaaaaaaaaaaaaaacaaacaaaactgaactcaggagccaggtgtggtggttcgtgcctgtaatcccagcactttaggaggccgaggcagacagattgcttgagcccaggagtttgagactagactgggcaacatagtgagaccccactctacaaaaataaaaaaaattaggccgggcgtggtgactaacacctgtaatcccaggactttgggaagccaaggtgggtggatcacctgaggtcaggagttggagaccagcctggccaacatggcgcaaccccgtctctactaaaaatacaaaaaattacctgggcgtggtggcaggcgcctgtaatcccagctacttgggaggctgaggcaggagaattgcttgaacctgggaggcggaggttgcagtgagccgagattgtgccactgcactccagcctgggcaacagagcaagactccgtctcaaaaaaaaaaaaaataaaaaaaaataaaaaaataaaaaattagctggacatggtggcgcatgcctgtagtcccagctactcaggaggctgaggctgaggtgggaggatcagctgagtccaggaggcagaggctgcaccatgcacttcagcctgggctacagagtgagatcttgtctcaaaaaaaaaaaaagaaaagaaaagaacaagaaacgaactcaggtcacattccttctgtctcaacgccctcccatggctccacctcactgagtgaaactgtggcctatgtgaccctacaaaactggtttctgtcacctctctgcccttgtcccctcccacctgcccctcactcactctgctccagccgcagtgacctcctagtgtcctcccatactccaggcaggctcccacctcagggcctttgcacaggctgttccctctgcctgaaacactcttcctggaggtcctcatataactgatcattctcatctttcaagtctcagcacaaatgttaccctctctgagaagccctccttgaccacacacatgaaaagaaccaccactcccaccctctctctactgtaaccctactccttttctttttttttttttgagacagagtcttctgccgcccaggctggagtgcagtggcgggatctcggctcactgcaggctctgccccccggggttcacaccattctccttcctcagcctcccgcgtagctgggactacaggcacccgccacctcgcctggctaattttttgtatttttagtagagatggggtttcaccgtgttggccaggctggtctcgatctcctgacctcgtgatccgcccgcctcggcctcccaaagtgctgggattacaggcgtgagccaccgcgcccagccctttcttttgaagtatctgtcagtctcttaaatcatcttttctgtcaatcatttctttgtttatgatctatcttccttttgacagaatatgtgttcttcgaaggcaggaacttaattttgttgaaaaatagacaaaaatccctgggagaaagacaataaacaaatacagaagtaaatttatggtatgtcagaaggtgacagctggttctggagaacaaaaaagcaggaaaggggtgaggggccagtaagggtgttgccctttaagacagggtaacaggccaggcacggtggctcatggctataatcccagaacttgggaaaccaaggcaggaggatcgcttgagcccaggagttcaagaccagcctgggcaacatagggagaccccgtctctacaaaaaatcatgtaaattagccgggcgtggtgatgtgtgcctgtaatcccagcacgttgggaggctgaggcaggaggatagcttgagcccaggagttcaagaccagcctgggcaacatagtgagaccccatctctacaaaaaatcaagtacattatccaggtgtgatggtgcgtctgtagtcccaacaagtcgagagactgaggcgagagaatcacttgagcccatgatgttgaagctgcagtgagccgagatcatgccattgcactgtagcttgagtgacagagcgagaccctgtctccaaaaaaaacaaaaagggaagcagtgaagtgtggagcagagatcggaaggagagaccgggagccatgtagatacaaggggagagtgtccaggcagaggagcagaggctggaagggtgcctggtgtgttggaggagtggtggggagacccggggagctggcgcagagtgggcagatgagtgaaggggtgtgtgagacaagatgaggacagaggggacagaggtttattttgtgggactgcccaggccacggtggcgagtttggattttctccaagtgtactagggaggtatggaaaggttttgagcaaaggagggataggatctaatgtgcgatttcaaagggctccttgggtgctatgtgcagagtggatctcagcagtggcaggagcaggggcccaggaggggcaggtgtctggacgtggttgcccgacgtagcctgggtgtctgtgttccaggtgaacggctcccaggctggcctgcccctgactctggctggggggcacactccaggccttcttcacgcccttggccatcacagtccaggtggcacccggcctctccatgacctttcacgaatcccatgccctctgagtggcagtgcctgagacctacaccaacaccctctgtggcctgggcggggacttcagcgtggatacccaggatgacttcagcggctctgatagcacatggctctctgatgccaacagcttaatgggggcccagcccctctgtgcccaccagacaaggcagccctataccaggccttctgtggcttgctgggcacccaagatgggccctacagggcctgcagtaaggacgtggatccccaggtgcatgtggagaactgcatccatgacctctgtgccacggggggctcaagagagactctgtgtgccatactggggagctacgcccaggaaagccagcagcgcagcgttcccatgcagccctggagacacctcttggcctgcagtaagtgggtattcccagggagggtctttctcagcctgacctccccagctggcccaataccacttccaggatgtcctcctaggtcaacaccacccaaagtgacccactgcatgcctttctggctaactgttcccgcgaagaacctacctgcttaaaactctgcaataacaataacagatgacactgagtgctattgcatcagtcaggatggtctgggttatgctgaagtaacgaactaacctgaacatgacccagcatgaccaaggttgtttcttcatcactatcttcgtcacctttgtcatcatcacagtcactatcatcattaccgtcaccatcaccaccaccaccagcgtcaccatcaccaccaccaccagcctcaccaccaccaccaccaccagcattaccatcatcaccaccaccaccatcaccacaagcattaccatcatcactaccaccaccatcattgttaccacaaccacaaccatcaccaccatcaccatcatcattgttaccacagccacagccatcatcaccactaccatcaccaccatcatcaccatcaccaccatcaccatcatcatcaccaccaccaccaccatcaacatcatcatcaccatcataaccatcaccaccagcatcaccatcaccaccagcatcagcatcaccatcactactataatcaccatcaccattatcactaccaccaccatcattgttaccacaaccacaactattgtcatcaccaccaccaccaccctcaccactatcatcactgtcaccatcaccgctatcattaccatcaccatcaacaccatcacatcaccaacaacatcaccagccctaccaccatcatcatcattactatcaccacgaccaccaccaccaccattatcaccaccatgatcacgccaccagcattatcaccaccgtgaccacgccgccaccgttaatcaccgccgtgaccacgccgccaccgttatcaccgccgtgaccacgccgccaccgttatcaccgccgtgaccacgccgccaccgttatcaccgccgtgaccacgccgccaccattatgctacatcctgatgatgcctccacctcccctcctttgcctttatgacttacccttggcccccacaaccctctctccgctcccttggtcctattctggttggaaatgctccagaatagtaatgcttgctcaattatttaactcctacctgttttcttccagagctggcctgtcctccccgcagcaattacgagctctgcggctcctcctgtcctagctcttgtgccgagcctgccctgcccgacagctgcctgacaccatgccaggatggctgccagtgtgacccaggctttgtgctcagtggcatggactgcgtgcccccaatccagtgcagctgctccatggggggcaggtaccaccacccggctggggaggccttctggactggggagcgctgtgagcaattctgccactgccaggcctccacccacgccgtgtgctgctccccgtcctcctgtgggccggggcagagatgtgagaccctcaggggcatctttgggtgccacccactctcccctggcatttatcaagcaaccatgcactcacacgtcgcctcctttgaccggaagagtgttgagtttccaggcacttgcgcttctgcttttaccaagtcctgtggctcctccagctcattgcgccttttcaaggtggaaattgggaaggagaaacaagtccagcagtcccattgtgttcatttcaaagatgtaggttcatgggacccaggtttgtctgcagagagagccccgacctgatgaggtaagcactcattggcatctagagactcttgaaccgattgaagctaaaagaaatacattggctcaaactaagtaaaaatcatgtgatagcctagtgaaagtgtagagattctgggtccacagaagttccctatataccactttggctgttttggttacagaaagcctcataaaaggtaactcaaaccagtcacagactgtgttttatgatttttagactaattacataactgaaaattccagagggagatcaggcatggtttgatcagggtgctaactcagtttttcagcatttctcttggtctgtgtttctctatagcattagctttgtcctcaggctggcttttcttgtgatggcaaaataactgccaattttccagtcattaaatgtgtattccccattgtccaaaacccgaatcttttcttaccccaagtactcaacaaaaattccaatgcttcactttgattaaaccccactgagccaatcagtgcagcccagaggttttcttaagcctatctaatcctactcaggagttgtaggtgggagagatcctgcccctaccccccatctctggcagctacttcttgcagggagagagggcaaaatgggaatccacccctgtgtccctatgtcccccgaaaccagtatttcttcttaacaatcttcaaagagtgtaaatgccctggtaaacctccactctgagacctgaaacttttgtctagaacccacaggggtggatgtgttttctaggcccgagggcccctgcctacaagagttccattgttggctattggaaaacacacagccacacccctcccactccacccccttccaggaagggaaccagctttcagaattagtcatgctgtcagcgtcccacacaacgagcccattgactccaaagggcagcacagcagatggactgctattatcccagtggtacagatggggaaactgaggcccgggaaggcagacttgcttgcctaatgtcgcataaggagaaagtggctgtgctaggattggaacccaggctgtcaggttctgagcccttccctttctgtctgtgggcctactgtgtgctcccaaaaagctgtggccaaattaaggaggtggcatgtctgattcatctgtggcggggcctgggatatatagtaactctcaacaatggtgttcattagtccgggcatggaggctcacgcctgtaattccagcactttgggaggccgaggcgagtggatcacctgaggtcaggagttcgagaccagcctggccaacatggagaaaccccatctctactaaaaatacaaaaaaattgcactttaggaggctgaggcgggcagatcacctgaggtagggagttcgagaccagcctggccaacatggagaaaccccgtctctactaaaaatacaaaattagccaggcgtggtagtgcatgcctgtaatcccagctactcgggaggccgaggcaggagaatcacctgaacccgggaggcggagattgcagtgagctgagataacgccattgcactccagcctgggcaacaagagcgaaattccgtctcaaaaaaaaaaaaaaaaaaaagaatggcgttcattcatccactcattaaaaacttcctgagcacctactatgtgccagaccctgggctcagtgctggggaaacagcagtgggtggaacggtcaagatctctccatcgtggtggagctgagattccagaggagagagagacaataggcctcaccagtatgaattatatagtttgtcaggaggccgtatgcgttcgtgtcagggaagaacatacagaacaggatggggaggggcggtggtggcttccagatggaaaagatggttttaaattgagaagccaaggaaagcctccttgagaaggtgatatttgagcagaaccccaggagagaggcactcatgtgcacatctcaggggtgagtgagtcccgcaggggctggatggggcctggtgcattggacgagccacagggaggctggtgtggctggagctgagcgaggggctggggagaagagacgatgaggtcagagaggtgacggggaccagatggtgggggacttatggggctagtgaggacttcgcttttgcctggagcgaggtgcgccgaggacagggctctgagccaggtggcccctgatgggactcaggtggtcccaggctccctttggctgcaggtgggaacagactgcggtggggcagggaccagagcagggagaccagggaggaggctctgggacgtccaagctggaggggacaaaggctgggccagggtaagggcagtgggaggggagaagtggatggttctggaaatattctctggggtcttatcccctcttcaaaccctgctgactgttcctggggccctcaagtttacgtgggcccctggttttgtttttgtttttgtttttgttttttgagatggagtcttgctctgttgcccaggctggagtgcagtggcgcgatctcagctcactgcaacctctgcctgccgggttcaagctattctcctgcctcagcctccagagtagccgggattacaggcatccaccactatgcctggctaatttttatatttttagtagagacagggtttcaccatgttggtccgactggtcttgaactcctgacctcatgatccgcctggctcagcctcccaaagtgctaggattacaggcgtgagccaccacgcccggccgcccctgttgtttttagtactccgtgcactccctgcaatcacacagggtgtgtgtgcagccagacgtggggtggaatcctgactgcccgttaattaactgggtgactttccgctaaacaactaagcccgggtgccgcagtttccctaagtggaagaataactctccgcaggcagttaagtcctgcagccacaagcccccggattattggttgagaatagagagacagtcagcaatcgtaggtaaatgactcaggcccgagcaggggtgtggcgctggcgcaggctgagtgcggcactgccttcttggataccagggtgcagggggaaggggatgtggagatgggtcccggctgccagcaggctgctgggtcagtgcctccccgcagctgagggtgccagccaggatcttagaactgcagactcatggtcctgcctctgcagccaggagggagcctgccagccccagcaccagcctcagagccttggggctcccaccgttagggggctggggctgggtggccaggaggagttaagtcacccacagccaggaaggggcagagctgggacccaaggggctgtgaacggtgaactcatccaggaggaaggagaaggaagacattgtgggagggccaacaagaacacaggcaaaggaaaaatatatagacagtaaaaggaaaaatatatatagataaaatattcaatatataaactatagtaatatacataaatatagagtttcttaagttcatttaaattctgtttccttaactgttagtttacctggttctaaatttacttttccttccactttttcggtgttgttttttatcttgtgatttattattttgtgttaactttaatattacatttttaagggctgggcgcaatggctcacgcttgtaatcctagcactttgggaggaccaggcgggcggatcacttgaggtcaggagttcgagactagcctggccaacatggtgaaaccccatctctactaaaaaatgacaaaaaattagccgggtgtggtggcgggcacctgtaatcccaagctactcagaggctgagacaggagaattacttgaacctgggaggcggaggttgcacagtgagccaagatctcaccactgcactgcagcctgggtgacagagcaagacattgtcttgaaaaaatatattgtttaattgatttttttccccaacttttgagattttcgactatagaaaagtcatgtaacccgtacaatccactcaaatacccttcacatagcttcctcaattcttagtattttgcctgattcgctttatctctttatatctatgtaattttcttctgagtttctgtgtctcacttttcctgtccctatttacttgtccaggcgttttcaaaagactcagtcttctctgttgttggttgaccaataaataaatatttagcctttttctggagggagatcacaaaacaggacagagctcttcctgaatccttcaggcggattcgccctctcttcctgttctgcggaggacagtcctggggcctttgctgtgtcaaccatgccccgaggcaccccagaagctgcatctgtcgagtctgtgctgtaatcatggccttgaaggtggaaggcaggtctgagatgggaggtgacaggagcaggtctgggccggagcaaccgcaagcgcccgtctccttctctccctccctccctccctccttccctccctccctccctccatcaaaccaggcagagctggggcctggggcaccccagggagacagacctgccacctcagcaatggcttccaggtgggaatgggggtcttttagtccagacttttccagagatgctggaaacacagcttgtcctgctgtttaaatgtttgcaattattaatttttgcaatgctttgtaaaaactaaaggtacaatagttgggttccaccctgggaccgccagtttgcaatccttctcttagggactgagtcaggctggggggggggggcgggctgcagggctcccacttgaaccagaagtccctgtcccagatgtctagctccaaatgtgttccctgccctttcctgcttccctgtagttcctgcccgcacccaggacccccagccatctgcccaagccctccccacccccaccacgccgcccccactccccacatgatggggaagctggccaagacattcattcctccacaccccctgcccccatcagcagctccaccctcagcacccccacctcagctcctcctgcaaggcctccgtggatggggggtggcggtggagaaagcctttcttttataattgttttaaacctacttttatttttatttttgtagagacaagatctctctatattgcccaggctggtcttgaactcctggactcaaaggatcctccagcctcggccccccagagtgctgggattacaggcgtgagccatggtgcccagcctggtaattaacagatacttcgtgaccacccactatgcaccaggccctgttctataattcagatgaaaatccctgagaggagctgacgtgctagcaggggaggcagatagcaccacaaaaaaaaaaaaaaaaaagcaaacagaagtcaaaaggtcatagagaggtcagggggtaggtgcgatggtggtcggggaaagccacttgaacctcatggctttgagctgtccagatgcgggagaaaagagagccaggcaagggaataggcattgcaagggctcttggccagaaacatgcctggagtgatccaggaacggcaaggaggcccaggtggccggagcagagtgagtgacaacaggggttagggggaaccctgaacctcccctgagtttccctagtctgtaagatgggggtctccaaccggtggccccagggccttatccaaccactggatatttttcattctgtctacaaagtgttaagaaaacgaagttaccaacatttaaaaatcagggccgggtgcagtggcttgcacctataatccctgcgcttcgggaagccaaggtgggaggatcacttgagacccagagttcaagaccaggttgggcaacatagcgagacccccgtctctaaaaaaattaaaaaattagccaggtgtggtgacgtgcatttgtagtcccagctacaggggaggctgaggtgggagaatcacttaagcccaggagttggaggctgcagtgagccatgattggaccactacactccagcttgggcaacagagcaagaactcaccttaaaaaaaaaaaatccggaaggccgggctcggtggctcatgcctgtaatcccagcattttgggaggctgaggcaggcggatcacttgaggtcaggagttggaaaccagcctggccagcacggtgaaaccccgtctgtactaaatatacaaaaattagccgggcgtggtggcacacacctgtaatcccacctactcgagaggctgaggcacgagaattgcttgaacctggaaggcagaggttgcagtgagctgagatcgtgccactgcacttcagcctgggcgacaagagcaaaattccatctcaaaaaaaaaacaaaacaaaacaggagatttcatcataaaaatctccatttctagcttctgtgggtgagtgatgacgtcagagcagcacagaggcaggtgtcagggagcctgtggactcttggccactgtgtcacctcacatggctcctggaagccaggcggacagtgatacgtccacagccacaccatccccatggtggtgggacagggttacctgccagtgcccactcttctcccacaggtgctgagaccacagcgctgttccacaaagccccaggaagccacattaccctgtccaccggcctctctagccccatcttgcccaggaagtgggaccttggcgtatcgctgtgaccacacctcccagccggtcagcctggccgctcaggctctacctgcaaaggcaaggccccacccaaccagcacccctctcatggctgggggtgcctccaggctgccctctctagggccaggagcctgcagaaacgctcccagccttgaataaagagcaacgaaattattgaaacaaaatcaataaaagtttgaatcagggatggtataacatgctctggctttgattctgtgctttaattcagcgttcctgaaaaacttatgatgtcagaaactatctgtaggtttggtttttttcattttgcaagaattcccaggatatggagaaatcacagccactcacagccttaacaggttctttgggcccaaatgattccaaaagcaaaacgagagaaactttttcaaatatgtttattatgtatattatatacaatatattaataaaacatattacctacatgcatttaaaacataactgaagtcagattggcccagaagactcactccaaatgagacctaatccccaatagggtgcaagtgactgcacaaactctactcctcacagcccttcctaagactcagtgtgctcatcacactagggtctcagagtccttctgaccataaacccaagccccagcgccagcccaacacacacttggacgcagcatgttcacgtccagcctaggaagaatttatggttgacctggattgggtaaaaaccgtaaacgtctgtacctcagaatgtaagatcatggtgtttaaaactacagaacattcagaggttgtcagaagtctctaattgctggtcccccaggttgaaaccagcccttaggttgaaattttgacctgcaaatttttttttaaatctgaaccaaattttttaaattaaacccctttaaggtagtacattttcaagatgcaaaattcaaaaaatataagagggcacgtgataatgagtgagtctcacttccaccccaccctccagcctcccagtttccctctccagaagccatgggtatggatgccaatctccaaaaatattttattcattacaagtatatacatatgcattattttaccgctcacaaatggtagcacactgcacggtttcccaataccttgttttttttccccttagcaagctgtctgggaaatacttctgtatctaaccacgggcaggggtgttcctccaagatttttagacaacagttctccagttcaccccgttccggtgaagggcagagcaccccccgcccttcccagccaccctgtacacgcccctactcgctctcggatgcctgcagttcccaggcttcccagcagagggagacaccattccactcccaagaccaccaaggggtcgtcccagacacaagcttcaagggtctagggaagagacgctatccgcccagacacaaagaccccccttagctatactgagttggcctccgggcctccccttcctgtttctatctcctcctggacctgttgcttagagccctaccccgaggtccccccgcccggcttccttatgggaactggccccgccttaagagtggtaggagggagccttacccttgtctaggacctgggcttgacaacttgccccagggaaccacatagagaaggggtgtagcgctgggcgaacattgccctccccgatccctcagcgatgacaagtggggggtccttctctctgcccccagcaggccagtttccggaagagccttgacccaaacccccttttcctgtcctgtgctccacactcccagcagctgcttctccctggccaggccctgcagccctcctccccgcccccacggtggtgttggggtcgcctggagtccagctggtgtccagggcagagctacccctttcctggccctacccctccccgtgaccccaatcctccgccaaccgctcaaaggatccttgttctccatccagcccccagacaaaagtccctctgtctaagaaggcggaattgaggggagggggcacccccaactgggaccatgggggagcctgcacagaccccatccggaaggaatgcctggaggaggaggagcaggagacaggggaggaaagggggagggaggcttgtacagtgctgggggccttatgtggactaggaggcagccgcccccaccagcacccactctgtagacccaggcgtctggctcccagcacccacggaaagagcctggctaggaaactgcagcctggtgcctggcagacagttctcattctccccagggcagggagcaggttatgaccaggactaaggtcccagagtccccaccctgacccctccctgctgttccagccgctccctcatatccacccctgccccatctcctgactttggtcacgctagcatcttctgctgatcctgaaattgtaccagcggcaagatgtggcctggaaggggactttaagttctccacaactgccagcaatccttccaccaggcaaaacacatcatctaaggaaaagaagtgaggtcggaacaccaacgcatcatctcactgcatggccctggaggctctgccgtttaaagaccccagaaccttccccattcaaggtcctctcctgggcacaggagattggagaaagctcctcccttaattccaggggccgagttccagcccatccaattctccgtctcacctgaggctgctgtggtcctggtgaccccagggagcaacctgccgcccatggctggggagggggtgaagctgtctctttaagagcaggaatggagcccctgggcctcagggcatctgacttgttttctacctgcccaggtttgcttagggcgtggcagcttcggataaacgcaggactccgcctggcagcccgatttctcccggaacctctgctcagcctggtgaaccacacaggtgagcagctggggccccttcctccaagccctccttgtctctgcccctaaattaggaagtatctacctgccccctgaccctgccccatagaagcttttatgttaaagcgcctaaaatcttgtgaaatgcttttctggagccaggagataaacggaagtcccttcccctaatgtccctttccccaccattctcctctcagggacttgttgaaccagctgaggtgagggcaggactgataagtgtggttggggtgtctgaaagactagtgtctgcatggattagggatatctgggttggggatagctgggtggaggagagggggtgcctgggtaggtaggggtatctaagtggaccaggggtgcgtagatggactggggacatctgggtggatgaggaatgctgggtggactcggggtgtccagacattgagggatctgggtggataaggagtgctgggtggactcggggtgtccagacattgagggatctggattctggagacctccaggaaaaaaggatggagctgctgggggaagctttaaatggggagttgcttgggagatttcaggagcacacagcgggcaggatctttctacccacccctgaacatgagaccattctcccatggtatggaggaatagaggggatagcagagggcaggtgggggaaacagtcctcaggccggccttgggacctcatggccaggaaggatgagagcaggtagacagagcatcagctgcagggctgccttcctctctaacctgctcaccaaccacatcagttcgggagcagcccacagcctcttcagacaacagcctgaatggggaacgtgagggcagacccagctcccggctccctgcagcctccggaagcatgggactggacgttgttttgcagaggctggggcgaggaggataccatctgtcagtcttggctggatgacatcatgggaagggggtatagtggggccttgcaggccagaggtggcttggaggagcccctggaaagaggcttaagaggtgagactcaacagccatggcgacagagcatagggctttaagatgaatttgcaggggttacaggattacaactgcaatgtgggctaataatagtgccccctgcattaagctgcagagattgagcgagtaagtgggaagctgagaaaatgcccccatggggtagacactcaataagcatctgctgttattaccaggactcgtatggtcatgggtgacagcttcagaccacaggcagtccacctacaacctgtgcccctatccaacatgccatcctgcccacccacccacgccagctcccccaacccccaacacttttggggatcctaaacacttcctgggcctcagtaatgctccccaaagcctcaggctttcttcccgcaaaaaaaggaaaagaaatggatgctccaactaaaattgtgagttcagcatgtggaattaactgggaagctgagaggattcccaggccctggggtgccaggcagagggaggagtctgtgccaacctgcaaggaccacccgcaccgttggttgcgggcaccaccctctctcagcatttttgctgttcgtgaaatgaggacatagtggacgacgtcggggattgctggggggttaagtgagtgagaacacggcaaggtcagtgtgcactccagggcaaggtggaggaagtgccagctctcgctatcaaaattataactaggccaggcgtggtggctcacacctgtaatcccagcactgagggaggccggggtgggtggatcacctgaggtcaggagttggagaccagcctggccaacacagtgaaaccctggctctaccaaaaatgcaaaaattagccgagactggtggcacacgcctgtagtctcagctactcaggaggctgaggcaggagaatcacttgaacccaggaggcagaggttgcagtgagctgagattatgccattgcactccagcctgggtgacagagtgaaactccgcctcaaaaaaaaaaaaaaaaaaaacaattatgataactatgcactcagcatttgggcagggacagggcagggacagggcaggggagggcatgctcggaggccagggcttggtgcagccttgcaggctggtgagagggcaggactgatgccaggtcaggaaggagagagaaacgagttccttatgctgagcaggtctacctgggaaagagaaagtgtttgctgtcaccaggaactctgctgggcctagggtagggtcaggggctgggctggggaccccggctaggcagagccagggctgggaccgggaagggcatgggtgtgggatgaggggcaggaggttcgggggaacagagatggagctagggctgcagccaggaggtagagtccccctctacccccagtcccagcctcacgtcaattcctccacacaccaccccacccccaagcagcttgaagaacctgctcagtcctcagcctgaagtctgcaatgtcctggcagggccgggcaggctctgagcggtctacggagacactcctgggaagcgggcctcctgccgcctggctcccaatgccccgcttccccaaacaccccaaggccctgacagtccctagttaggagcagctgctggggagccaggcctggcttaaatcctacttcctggctagagcacctagtttcacctctcagagcctcagtctccccatctgtccagtgaggacaacagcgggcagtggcgcccttgtttggttgcggggcgattcccagaaagcctgaagtccatgtccagtgagttattatggctcctcccgcctcaggcccgagtttcacccagtccccactccacggtgcagctgcggcttatctctcagcccagcgagatgccagccttcctgtcccgggtgagctgcgcaccctgcctggggagcaggggaggagggttggggagccacaggcacagggccagcctcccggtggctctgctaaggccagacctcccgccacccctctaggccagcgctctgacatgcagaaggtgaccctgggcctgcttgtgttcctggcaggtgagtacccatcccccgtctgccttttcctctggatcccctggatgcggggatccaacctctgtctctctcctgtgcttttctacctccccgggaaggtggtaaatgttagaacagcatctccctgagggtaagaaaagtcagactagtgatagccggggatacacgagaagagctggctcacacagctggaaagtcaccgtcttccccattctctcgatctcttctttttttttggctttttttgtttttgtttttgtttttgtttttgtttttgaaagggagtctctgttgctcaggctggagtgcaatggcgcaatcacagttcactacagccttgaactcctggggtcaagcgatcctactctcttagcctcctacacagctagaatgccaggcacacgccaccatgcccagtgcatttttgattttttgcagagacgaggtctcactgtgttgcccaagctggtctcaaactcctggctgagtttgatcctcccacctcagccttccaaagtgctgggattacaggcatgagccacactgcactggccttgattgactattaaacagaaataacggaagctagagaagatgatgaaatgacaccttcaaagcactgaaagaagataactgccctgccagttctctaaaaacttcaagtagaaggctcagctcagtgcgactgcatctttaacttccaaacacttttcccttttttcttttcttttttttttttcggagacagagtctcgctctgttgcccaggctggagtgcagtggcatgatctcggctcactgcaacctccacctcccaggttcaagcgactctcctgcctcagcctcccaagtagctggcattacaggcgtgtgctgccatgcctggctaacttttgtatttttagaagagacaaggtttcaccatattggccaggctggtctcgaactcctgacctcaagtgatcctcctgcctcggccttccaaagttttgggattacaggcctaagccactgtgcccagcccgctttttactttttcactgcagccttgacctcccaggctcaagagatccttccacgtcagcctcccaaagctctgggattacaggcacactttttgtccattacatagggcaagaccagtattccctgcagggtagtgatctaaaattacattttcaataaagtctatttaagtgtataatagtgagtcattttcaatgatgtgcaaacaccagaccaggtgggtgtggacatggtggaagcgggaggatgggctttgagcatgattggacttggggaaacaggaatctgggaactgaaaccatctgtcgtcttgaccagaaaagtcccccgctgctgcaggaggcatggattaaccacgtgtctggaaacatgagaccaaatagtggctaaaaacctcctagattagaacccatttcaggtggcagaatgctggcgtgactcggaggtgtggggctgagtgggcgagtccacatttcctcgttgggatatgaggggatgaggtggctgctcagtgacaggacccctgtcccgcaggagaccctttcccaaggcccctgaaactccccaggccctgcccaaaggcttggctgaggccggcatcaccatctcccctccttcccctcttctcccactaggctttcctgtcctggacgccaatgacctagaaggtgagtcagactggactctcacccgtcacacccccaaattctcccctgggtggggaaggcctgcatcctggctgtaatcctggattcatgatcttttttctttccttgcagataaaaacagtcctttctactatggtgagagcccgtgccccctttcccctccccacaaccccacatactgcttggtgccaagggttcccatacagggttggggcctgacgtgagcatcacaggacaaagatacgaagggactaggatggggttactgaatatgccacacagtggattaaaggaactagaggcagcaacctggcctttgggaaggttctattccagcaagatagacacacgcaggaggtgaggacagtttgcaagaagccattggttggttcagatcaactgctgggagaagtgttgacttgagaaaacttcctggaggtggtgagctattggatcaaaaccctcatctggcctccaggttccaatgacctgctccctactccccgctctgccctcacctctccacgctcctcattccttctgctccaagcctctcagacacagcagacatactgccagcctcagacctctgcacctgctggttcctctgcctggaacacttccttccacagaaccacatggctccctcccttccctctgctcaaatgcagccccctgagaggccttccctgacaactccctctaaaagagctgccatctgactttttttttgttttagagacagcgtctcacactgttgcccaagctggagtgctgtggtgtaatcatagctcactgcagcctcaaactcctggtctcaagcgatcctcctgcctcagcctcctgaatagctgggactgcaggcatacaccaccatgcctggctaatttttgtatactttgtagagatgggttctcactatgttgctcaagctggtctagaactcctgaactcctgaagtcccaaagcactgggattatattaggttggttcaaaagtaattgtggtttttgcaactgcttttaatggcaaaaatgcaattttttttttttgaggcagaattttgctctttcacccagagtgtgactggctggagtgcaatggtgcaatcttggctcactgcaacctctgcctcccgggttcaaatgattctccagcctcagcctgctgagtagctgggattacaggcgcctaccaccatgcctggctaatttttgtatttttagtaaagacggggtttcaccatgttggccaggctggtctggaactcctgacctcaggtgatccgcccaccttggcctcccaaagtgctgggatatcaggcgtgagccaccatgtctagccaaaaacgcaatcacttttgctccaacctaataggtgtcagccactatgcccagcccgccctctgactttccatctcccaccccacttatttttcttcaaaccacttatctctgcctgaccctgcacgacagatcgtgtttgctggtgtgtgaaccagaatgtgagcacctgggattttgtctgttttcttatggcggtgtccccagcaccctgtgcatcctaggtgctccatatatatttgtcaagagaatggggggacagatggagaggacacaggctggcactgaggtcccctccactttcctcctagactggcacagcctccaggttggcgggctcatctgcgctggggttctgtgcgccatgggcatcatcatcgtcatgagtgagtggaggagctcgggggagcaggcgggccggggctggggctcccctcccctgaccactcagctctccccaacaggtgcaaaatgcaaatgcaagtttggccagaagtccgggtaagatactgttccggcatgcccgcctcaggctgactggacgcttttcagggtgaaagggctaactctcccagcaggagaggcctcggggctctgccctttagagttcctgccgctaagatttccaggtttattgtttctagctggtaatccccagggggccccaaatcctgaaatgctttggcccctgggattgcacaaccccccaaatggaaaggcagccaggaagacatgtctgggcaggctaagaaccctctatccggagggagagggcaaatgggggcggacaccaatctcaccacttttgtctccttagtcaccatccaggggagactccacctctcatcaccccaggtaagatggggcagcatggggctcaggggaacacggaagtggtgtgtgtgtgtgtgtgtatgtgtgtgtttgcacactggaaagaaaagaactcaatccaccctcacaaacggaccccatcacttcccgcaggctcagcccaaagctgatgaggacagaccagctgaaattgggtggaggaccgttctctgtccccaggtcctgtctctgcacagaaacttgaactccagga

SEQ ID NO: 56 - DNA, 150468 bp, Homo sapiens
ttcaagggtgagcagtatgggccagtggtagggtagaagaaaagaggctcattgaagaagccgtgttacagctccatgactgctcctgcagagcaggactacccggtcccgtaggcagacagcagcagctcagagcagttctgcagtcagatttatgctcacatttaattgcacgtagattaaggggcagtttatgcagacatttctagggaaggggtagtagctttggggtcattatatcattgccatggaaaggggtggtgactctccggtgttgccatggcaatggtaaactgacatggcgcactggtgggtgtgtcttatggaaaactgcttccctcccgtccctgttttagctagttctcagtttggtcaggtgtctgagcctcacctctggagttgagcccacctcctacctcacgggtgtactgcagccagtgagtgtcattgagtccctgcatataacaaacagactccgagatctgccttcacccagtggcagttcatgaccttttggacatggtgcatagatagtgatagaatagaaaggcagtaacgtcatccactatgcattgtcttcgttctaatcacaaaataagtgtttgaaaaattaagcattatattttcaggtgcctttcaaattctagacccagcgtacatacatacatacatacatacatatatatattatgcataacacatctatgtgccgtatttactttttttttttttgagatgaagtctcactctgttgcccaggctggagtgcagtggcgccatctcggctcattgcaagctccgcctcccaggttcaagtgattctcctgcctcagccacccgagtagctaggcatgtgccaccctgcccagctaatttttgtatttttagtagagatggggtttccccatgttggccaggctggtcttgatctcctgaccagcctcccaaagtgctaggattacagcatgagccactgcgcccagcctttatttactttataactgtacttaccttatgtaatgagtatatatgaagtagtgctaaaatatacatatttaacatttaaatatcatgcagcattaaaagacatggctgggtccagtggctcccatctgtaattccagcactttgggagaccggcaggcagacggaatgaacccagggttttgagaccagcctgggcaagatggtgagactccatgcctacaaacaatacaaaaattagccaggcatggtggcatgtgcctgtagtcccagctactcaagaggctggggtgggaggatggcttgggcatggaagaccaaggctgcagtgagctgggatggcatcattgcactccagcctgggtgacagagcaagaccctgtcacaaaaaataaataaataaacaaacaaacaataaaagacatataaataaataactgtcctctaccttgcatccacatcccataatcaatcattttcgtcttttggctcttctattattgctttatgttgctgaataatttgcatattctaatatctcttttgcattttaatcagtattattgaaggatagtttatatacaataaaatgtgtctcttttttgttacttatcgttttgaaacacctgtattccacatgtgtttattaggtgtttacgatgctctaaaagtgcattacaaataagtcatcaaaccactagcttagcaaattcacacaggcatgtcagcagtggggaaaataaaacaattaattataatgtcccattaataatatcctgtaaatatcaaacacaacgcattttttttctttgtcctcattgcaaactatactgcctaggccatccgtaaacaaaaatttttgtgtgtattataagtatttccatcagtttgggattcttaaactcaaaattcttggctctaccagttgcaaacttttaaaattttaattctaatcagtcatataaatgcacaatagcaaaagtcaaagaattcaacaagatttctaaacccagcagctctcttctctactccatgccgtcccaccccatccccctctccagaattagccactctctcttttagtgcatagttctattttcatctccttttttttttttttttgagttggaatttcactctgttgcccaggctgtagtgcagcagtgccatctccgctcactgcaacctctgccgcccgggttcaagcaattctccagcctcagcctctcaagtaactgggattacaggcatgcaccgccacaccaggctaatttttgtatttttagtagagacagggtttcaccgtgttggccaggctggtctcgaactcctgacctcaagtgatccgcccatctcagcctcccaaagtgctggaattgcaggcatgagccactgtgcccggctccacgtttataaatagcaggtttatatacagtcttgaatttgaatgttatatattatcaacttactttttactagaagatgatgaattcgctcttttcactcctctcccacacacatatttccttccccccccttcaatcctcccagaattgtcatgtcatgatttttattaagttcactgattatgttatggagatcaggaaaatgttagagatgagctatgtcgtgcgctgtccttacatttctttctcatgcaaactttttgcttttctttacaactgtagttgagatttgtccttttctctgctttgaataatttaaactccaatctctgtccttctgctccaatctatactttcttcaagccagctgcatgattctcctgctgggacttcacttcaccatctagtcatgttggtcctccattttctctttcctggtttactcccttgtttagggtgaaaatatcttccaggagcttcctgagaaagactgtttgggaggaaactttttgagactttgtttgtctgaaaatgtctaaccctgtttccacttgagtgataatttgatagaagtccaggttaaacagcagtttttccccagagtgtccaatgtcctcccacctgtgatcctttgactgtgatctgtttggctttttttttttctctctctggaaacctctagaactgatgttctgaaatattattaccatattttaacaattgtggagcactctgcaggctcttcaaatttctttcagttatggggacatttctttaatactttcttcactactggagtttctgttttctcttttttggaatttctgaatttatcctctaattttcttatattgtctcttattatccacttttgtcttttattctgctttccagaagttttccttttagtttgtcattgttttttagagacaaattctcagcggctgggcacggtggctcatgcctgtaatcccagcactttgggaggccgaggcgggcggatcacaaggtcaggagatcgagaccatcctggctaacgcggtgaaaccccttctctactaaaaatacaaaaaattagccaggcgtggtggtgggcacctgtggtcccagctactcggaaggctgaggcaggagaatggcgtgaacccgggaggcggagcttgcagtgagccgagattgagccactgcactccagcctgggcgtcacagagagactccatctcaaaaaaaaaaaaaaaaaaagagacaaattctcgctctgtcactcaggctggagtgcagtggcactatcatagcccactgcagcctcaaactccggggctcaagcaatcctcctgcctcagcctcccaagtagctaggactgcaggcttgtaccacttgtaccaccatgccctgttaattttttaatagagatagggtttcactatgttgcccaggctgatctcaaactcctggtcttaagagatcctcccactttggtccccagtgtggtggtgttgggtgacgggacttttaagaggtgatttggtcattaagagagactgatgccattctctcgagactgggttaattctggaggcagtgagttctcactcttttgggactggattggttattgcaagggcaggctgttataaagtgaggttccccttaagttttgcccctttgacacacacctgcttctcttctgcttttccatcatgttatgatgcagcactagcccctcccccgaagccaaccagatgccacccactcggtattggacttttcagcctccagaaccatgagctaaataaatttctgttcactataaattacccagtctgtaatttatagtggtatattctgttataccaacaaaaaatggactaaaacaatcactgtccgtttagatttacccacacatttatcattttcattgcttgttattccatcttacagctcatattttccctctgatattgcttttctttcttctgacctaattttttaagaatttcctttagggggatatgttcatacaaaatatttcagtttttctctgaaagtgtattcagttcatcttcatccttgaatgattcttgggcctgcagttctagatggacatgtgttttctcccagcacatcaaagctattgttccattgtcttctcgttcccatttttgctattgagaaatcagtagaaagtctaattttgttttcatatatgtaatccatcctttatttccagccacttttaagattatgtcattttctttggtattctgtggtttctaggtatgctttttaaattattctttaaaaactgaatcgaggctgggcgtggtggctcactcctgtaatcctaatactttgggagaccaaggtaggtggatcacctgaggtcaggagtttgagaccagtctggccaacatggtgaaaccctgtctctattaaaaatacaaaaattagccaggtgtggtggcacatgcctgtagtcccagctactcaggaggctgagacaggagaatcgcctgaacccaggaggcggaggctgcagtgagccgagatcatgccactgcatggcattttcttcatctgatttttttttttttttgagacagagtcttgctctgtcaccctggctggagtacagtggcatgaccttggctgactgcaacctccacctccggggttcaagcccttcttgttcttcagccttctgagtagctgggattacaggcatgcaccaccacatctggctaatttttgtatttttagtagagacggtttcacatgttggccaggctagtctcgaactcctgacctcaagtgatccacccgccctggcctcccaaagtgctgggattataggtgtgagccactgtgcctggcctctgaattttttttaatgttgcttttatcctttttcttttgataactttgttcagtttctttgaataccctttcttctctatctttttaatgaaactttccaaacacagaaaagtcgaaagaactatgcagcaaatagctgtatacataccacctatgcccttaacatttcactgtacttgctctatatgacttttttatgtgtctaaagtgagttgcagacatcaggttcccacccctaaatctgccggttatgcatttctcttttagctacctttgacttggggggaactcttcctgtgccaagtaattgaagacatttgtgcacagtagggggaagcttttgtttctgcctagcaggaagcatttccagtttccaggaacgttgctaatttagaggaatatgtgtatgtgtgagttgcttaaacttcctttgccccagatggccaagaacagcatccggaaagccacttacagtgcagcagctcagccccacctcctcctggcaagcaggcagcatcctgtccagacaactgtgtgttgatccctcctccagcactgctttcctggccccagacatcaatggcagcaagtgccaggaaggttccaacggccaggctgtatctctcactctttgtgttccaaacaggtgactgctggtttgcccatcacaacgagcctcttgtgccttgtaggcttagtctaagatcagaaccatgggcactccttcttggcttcctcctcgactcacttgacttttcctgtgttggtagctcttcctcctctgacctttcagataccccctagttatgccagaagtgcagagtgcatttatgtttctgaatcctccttgctggtctggtgtaattcctgaaagaaggcatactgcagtaattttacttatgattctttttgcaactagcaagatcaaccagatatttatttattttcattttttagaaaattttaatataattttaatgttgtagggagcatggggaatatggagaagggcaggaagagacttttgtgggtgatgttggttagcttgattgtggtggtgatttcatggatatatacaaatgtcaatatcaaagataaaaattgtataatttaaatatgtgcagtgtatcatatatcaattatacttcaataagcctgttaaaatagttttaacaatgatgatatattgcaacttttatgtattttaaactaattgagtttttatacatgaaattgtacatgtaattgagtttaaaatacgtaaaattttaatgacaagttaaattttataacatacattcagtaaagtgcataaatcttaaatgcatagtataattaatttttcatatgactaccactaccactcagatgaaaatatagaatactggctggaagcaaatggctcatacctgtaatcccagcattttgggagaccaaagcaggaggatcccgtgtggccaggtatttgagaccagcctaggcaacatagcgagaccccatctccacaaaaaataaaaagtaaaaatattagccatatgtggtggcacatacctgcagtcccagctactcgggaggctgaaatgagaagatcagttgagtctgggaggttggggttacagtgagttatgattgtgtcacttcattccagcctgggctacagagcaagaccctgtctctaaaagaataaaaaaaaatatagaatacttccaacacttcagaagatccctcgcgccctcctagtcattatcccctgagggtaagcactattctgacctccatcaccatggattggtttcgcctgttcttgaactttatattaatggagatgcattcacgctgatacttgcggcaatagtttgctcattttcgttgccatatagtattccactgtatgaatatatcacaatttatttattcattctctttttgatggacattagggttgtttcaaggttttggctgttatggataaagctggtatgatcattcttattcaggacctttaatggacatttgtggtctttttacttgagtgttgtagtaagtagtataatagccccccaaaagatatgtccacatcccaaccctcggaacctgtgacagtgactttatttggaaaaggagtctttgtacatgtaattttttttttttttgagatggagtctcactctgttgcccaggctggagtgtggtggtgcaatctcggctcactgcaacctctgcctcctgagttcaagcaattctcctgccttagcctcccaagtagctgggattacaggcatgcaccaccacacccagctaatttttttttttttttttttttgtagagatgggatttcaccatgttggccagccttcaccatgttggtcaggctagtctccaattcctgacctcaggtgatctgcccacctcggcttcccaaagtgctgggattgtgggtgtgagccaccgcacacagcttgtacatgtaattaaattaaggatctcaagataagatcagcttgtattatctgagtgggctgtaaatccaatgacaagggtccttgtaagagacacagggagtaggagaaggccatgtggagacagaggcaaagatgagggttatgcagccccaagctaaggactgtttagagccaacagaagctggaagaggcagggaaggattagagccttcagagggaacatggcgcggctgacaccttgactttggccttctggtctctagaacactgagataataattctgttgtttcaagccacaaagtttgggatcatttgtgacggcagccaaaggaaattaataatacaaaagttcactttattaatactcatttatatttgtttgtgatgtgcacaacactccaatggaaattttaaaaagtgtttggagtacagactttcccaagcctggctaactttttcttccttctctgggaatggatgttttgcgcagtgtacagaagtgtggagagtgaccccaatgtccttgttgatgtgtgtctgtaaatcttacctgtcacagtgtgggcactctgagagccctgtgtccccaccagaagcatctgttccttatgcagcctgagtgtcctctgctagggtggccagttcccctcctcctgccctgcctttttgcaggttcacaggtgcaagactggctgtttcctgttaatattaactatacttgaattttcaaggatttttttaagaaaaaaatatataatgccaatacaaaaaaaaacacaggaaaaaaaattaaccttactaaactaaacctgccctgataggagggttcttctcacaaacctgactgcagagcaaaatggaattgctccaatttctccctttgcaaacaggcatgcatcaacttctcattttaacaactttctttctttctctttcttctttctttctttctctctctctctttctttttttcttttttttttttcagacagtcttgctctgtcacccaggctggaagtgtagtggtgcgatcttggctcactgcagcctccatctcctgggttcaagggattctcctgcctcagcctcctgagtagctgggactacaggtgcacgccatcacacccagctaattttttgtatttttagtagagagggggtttcaccatgtgggccaggctggtcttgaactcctggcctcaagtgatccacccgccttagcctcccaaagtgctgggattacaggcatgagccactgtgcccagcctttaacgactttcttaataagtggtgtgggaaaacacccagagctaaacaaaaccaacatggggaagtgacaagcatttgagaattcttacatttctcatagctgtattcccccagaatctggtatccagctttttttttttttagtctggagacaggttggagtgcagtggtgtgatcagggcttactgcagccttgccctcatgggctcaagcaatctgcctgcctcagcctcccaagtagatgggtccacaggcatgtgccatcagcctggttaaattttctattttttttggtgaagatgaggtcttgttatgttgtccaggctggtctcaaactcctgggctcaagcaatcctcctgcctctgcctcccaaagtgcagagacgataggcaggagccattccagcatctcatatgatgtggttgttgaaatcgactctctcgggaacatttaacaatagctaaaacagttgagtgggcactgggtgtgtgcttcagctcaggctcttacttatattgttagattccctcaaaatccctggaggtggggaatttccttgaggtgggggttttccacgctttccagatgagggctgtacgctcattgactagaggcaccgtgtctaagtgtctgaggcttaattcccattctctagaagagcagctgactatgtgtatgtcagtgggaaaggggagagcccagaaaatcattgcagtttatcacagccacccccaccccctccatcactgcagaaactgagcctccactatcttggagtttccttgaagagttcccagtcttggtgaaatatgggatggacggccaggcacagtggctcacgcctgtgatcccagcactttgggaggccaaggtgggtggatcactttaggtcaggagtccgagaccagcctgaccaacatggtgaaaccccatctctactaaaaatacaaaaattagccaggcgtggtggcgcatgcctgtaatcccagctactcgggagactgacgtaggagaatctcttgaacccaggaggtggagcttgcagtgagctgagattgcgccactgcattccatcctgggcaacagagcgagactctgtctcaaaaataataataataataataataataataagaaatatgggatggaatttccattggatgttaaagatccttccaaaataggtattttccacagaaaatgttatatttggtctgacaactccttgcaaaaatgaactcaaatggtcaggaatatttgttgctctaggttttcagaagcagaatgggcatcctttcttagaatacattctgggcccctcagggtgttcagggtgggaataaagtatataaaatgagaagtcaaaacagggaagaggtactaggggggaagctgggcagaggaaaggaacccttgggaggcccaaactttaatgctctggttcataaaatgcaaaaaaaaaaaaaaatccattctcatccctcctgtcctgttattgtcaagatgctagctccttggacaattcaggatacaccaagctttctccccggatagccgcaagtttaagggcaggaaatggccttggactgggtgcctttgctgagagaacagcagcactttgatccaagatgtccaaaagacaaagcagaagttcatgagaaacagaggccccagcatcacttggggtggcggggagggacctgtgcagcttgcgccatggacacctcgttagtgcataggagtgcatcagttttacagaaacggggctccatctagcccaaagggagaacgcccaggctgtgatcaaaggattgagggtaggacatcaaaggttagggactttcccgagtggaaaatatgggaagggattgggtcaaaaccttacagagaatgtgggcgagatttggtaagacgtcaaaacttaaccagacccaagtgggcatatttaggggaaaaccagaagtcatagttcattggaaacagacagatacggtcaacaaatcttcatgtatctggggagtgcaaatatcacgttattccttattgtgtgtcagaaatacgcaagcccacactgtgttgagtacctgcgtgggagtgggagatgttcaggcctgcacacgacctatctgtgcctcagctcttcttgtggaaaagtgctatagaaacagcacaagatctggaccatccaactcaccaacccaccccagctggaattcagtaggcagtcccctgaccctgttattcctctgaatatgagaaaggcagagataacagaataggagggcgatggtttcaatccacagggctctttggatgagaaaacatgggggtgttgttaggtagccctggtctgcttgatatttcatttctggccaggcgcagtggcacatgcctgtaatcctggcactttgggaggctgaggcaggtggatcacttgaggtcaggagttcgagagtagcctggccaacatggtgaaaccccacctctgccaaaaatacaaaaattagctatgtatggtggtgcacgcctgtaatcccagctacttgggaggctgagacaggaaaatcacttgaacccgcgaggcagaggctgcagtgagctgagattgcgccactgtgacaggcgtgggccatagcacagagcctggtaaccaccattctattctctgtttctatgtatttgagtttttttcaggttccacatataaatgagatcatgcagtatttgtccttctgtgtctggcttagttcacttagcataacatcctccagattcatccaaatggcagggtctcctcctttttgaaggctgtatagtattctgttgtattgtataccaagtacctttatctattcatcactgatggacacttaaggtgtttctatgtcttggctacggtgaataatgccacaatgaacctagtccaaaatgggaagtcctcaaatatccatcaatgttaaatcattaagtaaatagtggtatttattcacaatttatttcataggtggaatgctacacaatggtaaaaatgaacaaagtttagccatacacaataaggcggatgattcacaaccacaatggtaaatcagaacagctgggccgggcacagtggctcacaccagtaatctttgggaggctgaggtgggaggattgcttgagcccaggagttcgagaccagcctgggcaacatagcaagaccctgtctttttaaaaaatacaaaaattaggcagatgtagaagcacaccaggtacttgagaggcttaggtcggaggattgcttgagtgcaggagttcgaggctgcagtgagctgtgatggtgccactgcactcaggcctgagcaacagggcaaaaccctgtttcaaaaaacaaaaaaggaagaagaagaaccctaaacaaaagaattctaagtgtatcgttctatttgtatgatgttcagaaactggcaaaacgagagcttttgggaatacgcactcaagtagtaaaactctaaagaaaagcaaaggggctgggcgtagtggctgatgcctgtaatctcagcactttgggaggccaaggcgggtggatcccttgaggcaggagttcgagaccagcctggccaacatggtgaaaccccgcctctactaaaaatacaaaaattagcggggcgtggtggcacgcacctgtaatctcagctactcaggaggctgaggcaggagaatcacttgaacctgggagatggaggttgcagtgagccgagattgtgccactgcactccaacctgggtgacagagctagactctgcccacccactcccgaaaaaaagcaaaggaagggaagagggcagtgcttgtcttcaggaggaagagggtttggtgggaagacacttgtggtgtctaggggtgctgaccgcatgctttttcttgatctcagtagcggttgcaaggtgtatactttataattacatattaagctgtgcattcatattttagtcccttttctgcgtgtatcatctgtcataaaaaggttttaaaaaacatgaagcaacaaagaaaaaattgctgatggacacttatgtgtcttcacacaagatatgaaagaactttacaagaaaaacttaaaaaaagaaatagagatgggatctcaccatcttgcccaggctggtctcgaactcctgggctcaagcagtcctccgacctcagcctcccaaagtcctaggattacaggtgtgaaccacagtgaccggcacccccaccaaaaaaaaacaaaaaccctttattttaaaaaatgcctaaatgaggccgtgcgcggtggctcacgcctgtaatcccagcactttgggaggctgaagcatgcagatcatgaggtcaggagaccgagaccatcctggctaacatggtgaaaccccatctctactaaaaatacaaaaaattagctgggtgtgatggtgggcgcctgtagtcccagctactcaggaggctgaggcaggaggattgcttgagtccaggagttggaggctacaatgagtatgacggcagcctgggatagtgcaaccctgtctctaataaataataaaattaaataaaaaaataaaaatgtaagggaatgataaccatcaaacaaagggcaacggagacttctgaaaggaagacaaaagtggaatggggaggggcccaaggcagtcacagggtactccctggtaatgtgctgattctcaaactgagttggtggatggagttagggggtcgttttattgttctacaccccatatcttataacattttactgttatacattataacccacatctacgggtatatgtcaattctcatataataaaactggcacagtggctcatgcctgcaatcccaccacttttggaggccgaggtgggaggatcacttgaggtcaggagtttgggaccagcctggccaacatggtgaaaccccgtttctactaaaaaaattagccaggcatggtgatgcatgcctgtaatcccagctacttgggaggctgaagccaaagaattgcttgaacctgggcagtagaggttgcagtgaactgagatcgtgacattgcactccagccgggcaacagagcgagagtccatcccagaaaaaaacaaaacaaaacaaaaaaccaaaaaaaaaactggaaaagtaagagaaaagttcccagacctcagccttggggaatactaccagctttcacggaccagggagaggggcaggagttgtgcacgaaacgagatggagctgcatgaggtgggagaagaggaaaccgtgacatcgcagcggccaagggagccttccaggaggaagaagcgtctcccagggtcagggcttctaagagcagttggggaagacgaggactggaatttggatttggccacctgggggtgttttctgaacttggaggagcattcttgtgcccctacgatgcttgcagcagctaaggactccagacctgcagagtctgtcctgagacaggtcagacctcggcggtgggacgggaaaggggaactctctgtctagagacttgcgctccgatgtagttggaggtgctacactgtggctggccacagaccaacacgagcaatggaccacgagaggcctggggtagttagcctttccttcctgtgcagccaagaacggaaggatgagaggggttctttctgcctcctccttggcatgagcacctccacctccatgcccactctgtcctttctcccaggagcagctggccggagagtaacacgactccagccggacatggtcatgactatttcagcctgcaaggtcatgactctctggcccacctaggactcctaggggaaaggaagtgcctggtctaccgcccttcccctgcaagtctgaatgctgtgtggacagaggaggaggacccaataaggtaggggtattggagtactcgggtgcctgggaagatccaagcccggcctatagggtcaaggtcttttccaaaacaggggaaaccctttctggttcccgaaggtcctcccttccctattcgctgaacaggtgggtgccaagaagcccctgtcttgaggacagagagactgcggtctggcctccccagacccaggcagcctctaacatcacagccacagagcagaaactggcctggcttcctcccaggcccagaaggccccagctggccacctccctttgtttgtcttgggaggggcaactgctaagcaaacagggaaggggaatcccgattcggcctctctgtctgtccggctagccgttacccaggcccgggctctggtgcccactgaggcctggctccttcctgaccctttgtgtggaagggacacagggcaggagtgggtacagagaacacccagggctttccgaaaaaaatagcccaggcctcccacagatgagagaggagctatgtggttcggtaaacctcagttccagctacaggcaaatgggattaactgagcacttactgtgttggggccctggcctagccccatgcatgccagagccctccagatactgcctggccaccctgcagggtcctatcagatctcgagtctccaaaagaggaaacaggcttggggtcataagggaatgaggttagcaggggtggtaatcccacccagatctctctgactctcagatcacgggttttttttttttttttttttttttttctgagacagggtctcgctctgttgcccaggctggagtgcaatggcacaatcatagctcactgcagcctcaaattccgggattctcatgtgatcctaccgcctcagcctcccgagtagccagggctatagggacgtgccaccatgcctagctaatttttaactttttgtagagataaggtcttgctatgctgcccagactggtctcaaactcctggcttcaagtgatccttctgcctcagcctcccagagagctgggattacaagcatgagccactgcgcctggtccccaactgtgctcttaatcatagctcatttctcttagtggagccacgggggaaggtggtaagggggcttaagcgggagctctatccctcatctcttttttctctttcccagagaccacaccgctgttccagaccctctccatggatgatgtcctgcccctgatgccttgggagaccctgttggcacagggcagtccccagggctcgcctgacctcccagcagggcagcggaagcagcagccacagggtgacagggcccagggcctggcctctgagtcctggaagctcctggaggtgcccatcattcacataacgccatccagtgatggggagtcccccgcctgcaccccaaccccccgacgccggcagcagcagaggatgccagacccgcagagtctgtcccaggacaggtcagacctgggcagtgggacaggaaagagggtctctctgtctagggagggttctctctgtcaagggtgggttccttgtggctgcgggtcagagcacaaccttagccccacagagggctgactcaaagccacgaaacagatgcacaaacaaaaggtaaaaactgagggtgtgcgttgggacaaccagctatgactgagctcagctgagttctgcctagtaagagtggaggggaagccgggcgtggtggctcacgcctgtaatcccagcactttgggaggccgaagctggtggatcacctgaggtcgacagttcaagaccagcctggccaacatggtaaaaccccatcttgactaaaaacacaaaattagccagcgatggtgatggatgcctgtaatccaagctattcaggaggctggggcaggcggtttgcttgaacctggtaggcggaggttgcagtgagccgagattgcgccactgctccagcctgggcgtcagagcaagactctgtctcaaaaaaaaaaaaaaaaaagagtggatgggtggagagggaccccacccagtgtttttcaaactgtaggtcaagacccatttaagggccataaaactaatacagtgaattgcaatcagcccttgttttttgttttttgtctttttctttttgagacagcatctctctgtcacccaggctgaagtgcagtggcatgatcttggctcactgcaacttccattgctcccccctccacccagcagctgggaccacagatgtgcaccaccacacctgtctattttttttgtatttttagtagagacgaggtctgaccatgttgcccaggctggtcttgaactcctgagctcaggtgatgcaccctcctcggcctcccaaagtgctgggattgtgagatgaggcacccggccgcaatcagcacttctttatccaaatcaaaataaaatagaattgcaaataacaccatgcgtgaggcctaatgagggtaagtgtggtttcttacaacttctgtggcattatgtgtatttctaagtgcgtgctggaagcccatgtgaaaggtatttcctgctgtagatcacaggccaaaaaaacaaaaaaaaaaaaaaaagaagaagaagaaaaacaaagaaaaaaagaaagtttaaacaaaacttctgaaaagaaacactatctctggtacaaggagacaggaaatgggaggttcagggccatagggggaagaggaaagaactctaccgaccctgaatagaacaagcagccactgtggtttcttccaacaagggacactccataagcgttaaagtttaggaagcagagctttgtgcatggatgtggagaaatcgcagaaacaatgataatgggggacagcaagttgcaaatgaaacagagggagcctaatcgtgtatctttttaaaaagatactggataataggtgatagtgttggtggatgcctcctgatgtagaaaaaggacagaaaagtacacagggtccaggcgtgctggctcatgcctgtaatcccagcactttgggaggccgaggcgggcagattaacctgagatcaggagttcaagaccatcctgaccaacacagtgaaaccccatctctactaaaaatacaaaaattagccaggcatggtggcgcatgcctgtaatcccagctattcaggaagttggggcaagagaatcgcttgaaccgaggaggtggaggctgcagtgagccaagatcgagccactgcaccactccagcctgagcgacagagcaagaccttgtctcaaaaaaaaaaaaaaaaaaaagcgcaggaaggaaacacaccaactgcatggcaggcagaaggctccttggggggcacgggaagggaaaggagggatggggagccaggcctttggttgtaagtgtaatcatttatttcttttaaaaaaaggacctgaagcaaaatggcaaaatgtccacatctattctatataggtacaggggacatagaggactgttatattttcttcctttttttttttttttttttttttgagatggagtcttgctctgttgtccaggctggagcgcagtggtgcgatcctggctcactgcaacttccacctcccgggttcaagcaattctcctgcctcagcttcctgggtagctgggattacaggtgcaagccactacacctggctaatttttttgtatttttgatagagatggggtttcactctgttggccaggctggtctcgaactcctgataggtgatccaccctccttggcctcccaaagtgctgggattacaggcgtgacccaacgcgcctgacctgaaataaatattatttaattaaaaaactaaaagcattacactagaagaaacagaccaaagagaaatctaaagagatcagttggacagaggaaggtggtgggaggagggcctctcttccattggccggtgggaggcagcaaatgtcagatggtggatgggggttttagaggtgggggttagcatgagaggtagggcacggcgatagggggggtgctgtccatgcagagggaataaccagtgcaaaggtcttggggtaggaggcaggaaggtgcctggtgagttagaagaacagcgggtaggctggatggggggtgtgagccagggggagatgaggagctgaagtcagagagctgacaggggccttgggtgccaaggtgaggactttgcttttacctggagtgaggtacagctggggcagggctctgagccaggagggtagttaactgactcaggtggtcccaggctctctctggctgcaggtgagaacagacagtaggggcagggatgggagcagggagatcaggcaggagaggatggaggctgggccagggcgtgggcagcggaggaagaagagtttagaatggagcgattgattttatacgtggagcccacagtttgtgacggattggatgtggtgtgaaggaaaagagagggtcagaaaagactctgaagttctgggcctgccattcatcaaaatggagaagtcaggtgggcttcttttgcaggaggaggggaagggttgatggagagggttgggaagggagttttttcaaaagaggcggggacagcgtaccctggagagcgctggggagccacagccccggagctgtgaggtgggactcgcatttctgtgtggttgggccaggagtccaggacaccacctgactctgacctcttgcagacggggcgggggaggggggacgcaggttatggcgtcagagcaggatcgaatccaactctgccgcctacctaccaggtgaccccaacaagtcacttcccatcttagaggccgggcttctccttccgtaaaaggactgattttgcccgttcctgcgctgtccccgggaaaagcccttaccaccgagttagtgggactcccagcactggggtgatgagcgcaaggtctcagcacagataagagccagggaggctggattctgacttggtacttggcctggctgaccaaaactgggaagtccctagaaacggaggcaccggacctcctgggaccaggaacccgggctcagagactgggagagggaaggaggaggcggccaaccggccccaccccttcccgccagcttcaggccccctcccccatacatacacctcggtttcccagcatctccagtcctcccccaccttcgccccggctctcaggttcctccctgggaggtccaggagcttctggccaggggcatagtagttgctagggacccttttctaggtactaggggagggggctccccaacctgcgggcaggcagctgcctccacgatgtttggttttaataaagtctctttgtttccttctctgtctctctgcccctctgctttcccttctctgtccagtccctctctccccggcttctccctccttctaggcctctgcggcccctccccgccttccctcccgggctgggggcggcgccgtgacgcggcggggcgggggaaggaagggggtgtcgctgacgccgcggcggcctccggcggctccggccttttgtgcgggcggttgggtcgggtgggggcggcggccgcggaaggccaggccggtgccctgcggggacgcccagcgcagcccagccccgcgcagcccagccctgccctgccctgccctgccctgcgcccggggcgcgcccaccgcgccgcatccatgttcgagtaaggaccgggcgactagagctcagggaccgggcgcgcgggggaggccaccggagggagggggcgccgcgggcttggggagggggcggagcggccgctgcagaggtcgggggcctctgcacatggctctggccggggcgatcggggtgggggcggggcagggggcccccgggcgaggggtgcagctggggagtggggcgcggacgcagggcagggcccggggtctgggtcgccactgccggcccgcgacgcactgggttgcggggtttggctgggggcccgcgggttcatctggcggggagggccctcaggcctggcaaccccctgcctggtaagccaggggtgagcgcgaggccgaactggggctccggcctgggatggagacaggatcgggaccagcccaggcccacaggccgcggagccctgggcgcgccgggagtaggcagccccctcctgcctgggccccctcccaccgtccttggctgttgcgggtctcggggctgccgggggtgggggcttcctgcgtctctccaggaccgcgtgcttgaggtcatggagggcggggggtcctgtgtgctcggaattgacttcttactccccttccggtccaggtgggcgcatgtgcttccgactgtgaattgtcttgcaagtgtgtgtacgtgtgtctggggctgctagcctgcagcagctttgggcctctgatagagttcctgcgtgtaacttaaccactaattctgaccgcggctctgtgtgtcactgtaagttacctgtgtgtgtctggggctccaaatctgtggctgtgagcagctggttgtgtgcgtgttgtgtctcattccatctgtagctccctgtgcaaatataaattacccctgtgtgtctgagtgtgacgttggagtgtttgtacatgtgtctggagttaccgtgtgtagcagctctgatccttcttgggctgtgtgtgttttaccattaattctatctgtagctccaagcgttgctgtaagttaccagtgtgcgtcccattgtgacttagtggtgtgtgtacaagtgtgcctggggctctgggttctaccatgaccctctgtgcctgcatatgcctgtaatttagctctgaaacgctcttctttttttttttttcttttgaaatagagtctggctctgtcgcccaggctagagtgcagtggcacgatctcggcccactgcaacctcctcctgctgggttcaagcaattctcctgcctcagcctcctgagtagctgggattacaggcgtgtgccaccacgcctggctaagttttgtatttttagtagagatggggtttcaccatgttggccaggctgatctcgaactcctgacctcaggtgatccacccacctcggcctcccaaagtgctgggattacaggcttaagccatcgcgcctggcttgaaactctcatttagctctgtgtgccaatgtaagttacatttgtgacattgttgtgtgtctggggctctgtgagtgtggctgtaacttaatttgattccatctttgtgtgaacattcccttgtgtattcctttgtgacagtattgagtggtgcctaggcctctctgtgtacagctgagaccctctgtggttttgtgtgtgtgtgaacagtgtgagaccccttgtggctctctgtaggcttggaaccctcccttctaagaccctgggagtacccagggcactttggaggcaataatgataactgacgttgtccacctgttacagttagtatagcatgtgccacgcattattccactacctggccactgtgtcctcgagatccacgccctgctcggctgcattattcccaagtcctgcttgactgtgagcatcagggctctccaccagctacagccactgacacctccaccccttgccactttactttttcttttcctttttctctttcttttagacgcagtctcgctctgtcgcccaggctggactgcagtggcacgatctcggctcactgcaacctctgcctcctgggttcaagcgattcttctgcctcagcctccctagtagctgggattacaggtgcgtgccaccacacctggctaatttttgtatttttagtagagatggggtttcaccatgttggccaggctggtctcaaactcctaacctcaggtgatccacccgcctcggcctcccaaagtgctgggattacaggcatcagccactgcgcccagccccttgccactttagaagtagccttttctctgtcttccctgccagatggtgagcccagtgcgggcacgggaacaactcagtggggatgtgttggctgaccgtgggacctgatttacctgggactatgtatgtgtcacctggggtcttttgggactggtctttcactgtatggctgtctttggctctttgctgagacttcctcgtggctatgtgtgtgaatataatttatccgggactttctgtgggttgctgtatgtttctgtgaccctctgcagctctgtgtctgtgtgcacacatgcatgtgtctggataacttttctgggaaattgccatgtgactgtagcagactagcaatgctgcaggtgtgtgtgtgtgtgtgtgtgtgtgtgtgtgtaattactctgtggctctctgtagcatacctatgatgctgttgctctgtgcgtgtgtgtgtgtgtgtgtgtgtgtgtgtgtgtgtgcatatgagagagagagagaggaaagagactccttgcaattgtagggaaatgcagtttacccctgacacctactgtgtgacaatcattgagtttcccttttatgcacacctgtggatgcatccgcccttttctgaccagaggctgctctgggtccactggggcctaggaagttggaggtcaggtgtctgcggaagcaaaacaacatcccttccgagtctcctcgcccctataacagtcccccaggctcctcccttcactctgccttcagctatcctggttgggcagccgcagggtccgcccttgagtacttcctctttgcccagccctggagcaaaaactgggggcgtggtccctgccctgtctgtgtgccttgagcctctcttcaggattccggcccccaggccctgcccctagatctgtggctgcgggaaagtagggcaggtctgtgtttcaggctagagggctgagaaaagcaggcaggggaggatgtggtcctgctgcttaggagtctctccctgctcaccagtgctgtctgggtgaagccaaactcctgactagggtcaccaggcctgtgcacctccgctactccctcagccccactggccacctcactcacactcagacctgccaggctcagtcctgtccctgagcttgatgttctccacctggagtcttctcccagcctttgccacatgtgttctttgtcctcaggtgaacaagtgggctttgttcaggaaggcttttgctgactgttactaaagaaattggttgggcacagtggctcatgcctgtaatcccagcactttgggaggccaaggtgggaggatcacttgaggtcaggagtttgagaccagcctgggcaacatagcaagaccccatcactacaaaaaaactttaaaaatcagctaggcatggtggtgtgagactgtagtcccagctatcagggaagctaaggctggaggatcgcttgagcccaagagttcgggcctggagtgacctgggaggctgaggattgagaattccttgagcccaggagttcggagctgccgttaaccatgattttgccactgtactgcagcctgggtgacagagtgtgaccgtgtctctaaaaaaaatttaaaaagcatctctgcccccctagttgtcccatcccttatctctgtggtcctcaaacttgaatgtgcgtcggaatctctggccccaccccagttctgattcagaaggttgggagtgggtcctggactctgccttttgaacactttccaagtcctgcctgctgctctctggggctcatactgagcagcattgctttatggcgttcaccagtgtctgaggtcgccatccctgctcacttgttttcttactgacggtctatgtttccctgtttcagcgtcaggtccttgcaggcaggggcttgtatgggctttgctcacttccttgtggcgggtgcagggtatttagaggtgaaaggctggagttgagggtcagtcatggaggcgcctaacatcaggcgtagtgcttgtgaggtccctgtcagggtcagcagagcgtcatgggcagtggtgcactgggctggcagccgcgctgtacactccatcttagtccgccagtccctgtgggagggaaagcagcgtagttaaaccaggtgccctccaggtactgggctttgtggatctcacctcacctccatctctgtgcaaccctaggaggtgggcactaattcccatcatacccaagaggaaactgaggcacaggagggttcagacactagctcagggtcacacagaaaggacgcggtggcacttgactggaaggtccttggactgtggggcccacactccaggctgctgccctggagacctgcagggtccaaggagtcgtgcacctgctggaacccaagttctatggggggcggggaaggagggccgatcacccaggccatccccaacagtatgtgctcacggagcacctcctgtacgccaggccctgctctaggtgatggggacactcaacatcgtgggtgggggttgggggtggggagagaaggataagaactagggggaaatactgaaggtcccgggaggcagcagggagacttgctttgcagaaagagagcagggagggggatcgggaggcggggtagggggtgttaaatagggaggtagggaaggtgtccactgagcagagacctgagggaggtgggggagccctgtggatgtggatgtggatgtctgggaggaagggcattttgagcagaggcaccgaccaaggcgggagctgggagagggagtgcagggctgatgagggcagagagggaccacccaggaggaccctgatggactcagatgatcccaggctccctcccactacaggtatgggcagggatgggaacagggagaccagggaggaggctgctgggatggcccaggggaaaagcagtggcctgggccactggctgtttaattattttattcacgtattttattccacaaatttattttacaagtgttacatgagtgcctaccctgcatcctgtcccgcattgtgctggggacagagcagtgacccacagacccgtgaaggacttggacctgtcatcagacagtgacggcccagagtagtccaggatgggagctgcccaggggactgtggggtcacgcatgagccaaagtcctgaaggacaaataaggatttgctaggcaaagaagaactacgatctggacagacagaatggcatatgttaaggcttggaggtaagagagacaactttgagttgccccaggtggtggagggaatcccacctgcaccccagaatacatcaaggcccctaaatgggaatcctgccttgaaataaaccaagcccatggccaggtgcagtggctcacagctgtaatctcctagcactttgggatgctgaggcaggtggattgcctgagctcaggagttcgagaccagcaacgtggtggaaccctgtctctactaaaatacaaaaaattagctgggcatggtggtgggtgcctgtaatcccagctactgcggaggctgaggcaggagaatcacttgaacctgggaggcgcaggttgcactgagctgagatagtgccactgcactccagcctgggtgacagcgcgactctttgtctccaaaaaataaagaaaaaagaaagaaaccaggcccgtatcctatggcaagtggtttgccgctttgagctagtttcctcctctgtaaagcagggatggtgaatcatatcaaaggcaccggcttgagaaataatacggttaatcatacggagagcttgacatatttcctgataaggagtcaacaaagaatgtccttttaaagttcccaacgccatccccacagtccttattacagttcgtgtttgcacagtgaagttgggagtgtcctgtttgttcagtgtctgcctccccaccagaaggctcattccccaagggcaggggccatgtcctgcgggctctactgatgccagctccagccagcgtgcagattattcatttagcctctggtggttattgagcattcactatgtgcctagagttttgggctctagggacccggtggtaaccaagacctgaaggtcacagtctgggtagacagtaaacaaacagtaaacaagcaggacactccagatagcctggggtgtggcgacagaggtgcctgccttaggctggatgatgcggaaggagagcatttgagctgaaggggacagagctggtgatgccggggccatggaaggacattcaggcggagggactacaaatgtggaggccttggcgtgggaatgagattggagagcttagggacaaaagcaggctgggatggccaggggagaggaaggacagggagagggaggacatgaggtcagtgaggttccagggccaaatcaccacaccaaggtgaggtctttgcttttacctggagtgaggtgcacccagggcagggctcagacctgactcagatggtcacaggtctcctctggttgtaggacaccagtgaagaggctgctggggtgtccaggctggaggtgatggaggctggagcagggagaaatgggtataataaaaataacggatgctgggtgcggtggctcacgcctgtaatcccagaattttgggaggccgaggtgggcggataacctgaggtcaggaaggagttcaagaccagcctggccaacatggtgaaaccctgtctctacaaaaaatgcaaaaattagcggggcatgatggcgggtgcctatgatcccagctactggggaggctggggcggaagaatcgcttgaacctgggaggtggaggttgcagtgagtcgagatcatgccattgcactgcagcctgggcgacagagagagaccccatctcaaaaaaataaaaataatagaaatagagctgggtgcagtggctcacacctgtaataccagcactttggtagtgcccaaggtgggaggatcacttgaggtcaggagtttgagaacagcctgggcaacatagctagaccccatctgtacaaaaattttttaaaaataaaaaagctgataacagtggtgtgtacctgcagtcccagctacccgggaggctgaggcaggaggatcacttaagcccgggagctcgaggctgcagtgagccgtgattgtgccactgcactccagcctgagtgacagagcgagaccctatctctaaaaagaaaataaaaataaataatggaaatagattttgaaatgagagatgaagaaaataaagaaattaagaaagatgcttagggttttagctccgacaactgagtggaaagtcgctgttcaataaatatttgttgtatgaatcagtaagttaattttaaaaataggaggtataggccaggcgcggtggctcacacctgtaatcccagcattttgggaggctgaggtgggcagatcacttgaggtcaggagttcaagaccagcctggccaacatagtgaacccccgtctctactaaaaatacaaaaattagccaggcatggtagtgtgatcctgtaatcccagctactcaggaggttgaagcaggagaatctcttgaacccaggaggcgaaggttacagtgagctgagatcacaccactgcactccagcctaggtgacagagtgagagattccgtcttaaaataaaataaaataaaacagcaggtgtctttgagagctcgctatgtgccatgctctgttagaattactttacatgggctgggcacggtggttcatgcctgtaatcccagcattttgggaggctgaggccagaggatcacttgaggccaggattttgagaccagcttgggcaacttaggaagaccccgtctcaaaaaaaattaaagtaggctgggcacggtggctcccacctgtaatcccagcacttgggaggccaaggtgggcagatcatgaggtcaagagtttgagaccagcccagccaacatggttaaaccccatctactaaaaatataaaagctagccatgtgtggtggcaggaacctgtagtcccagctacttgggaggctaaggcaggagaatcagttgaacccaggaggcagagtttgcagtgagccgagatcatgccactgactccagcctgggcaacagagcaagactctgtcacaaaaaataaataaataaaataaagtaagataaaggaagtgctttacatgtcctgatttgtttaagccccaaaacaactggatgaggacatgtatttatcatccctggattactgatgaagtaaccgtagcacagagacgttaaggagcatgttctgagtgtcactgctgggaagagaaacaggatggctgggtggatgggtgtgtattcggggatcaatgggtgggcctctgaaaataggcctgtccccgaatcccagcctgttttttccagttaacacttctcttcctcttcctgcccccagcaccacaccccactctggccggagcacgccaagcagctccccatcgctccggaaacggctgcagctcctgcccccaagccggcccccacctgagccagaaccaggcaccatggtggagaagggatcagatagctcctcagagaagggtggggtgcctgggacccccagcacccagagcctaggcagccggaacttcatccgcaacagcaaggttggtgcaagcccaggtggggtggggagagggctagtgggggctggccggtgatctaggggctcatcctgactcctctccttttctttgcagaagatgcagagctggtacagtgtaagtgtctgggcaaggggcttgctggagggctgggaggaccgggtgctgggccaggagccccaggctgcaacagtcaaggagtgcgtgctgagatggagtgggtgcagacctagggtcacgttctatgctattatttatgtgctgtgtgaccttgggtgagttacttaacctctctgggcctctctctgtccttgagaaacagccccaccttacaaggctgaagggaacattgaatgagtcagtgatgctggtgggtgcttggtacggggcccggcttacataagaaatctgtaaatggcagctgtcattgtggctactggtgtgttgtgtgcgttggaatctgtcagggacttaagagactgagggggttccaggagctttgtggggcagcattgggagtgtgaacccccatccaggttctcacctctcaaacttcctcagatgctgagccccacttataagcagcgtaatgaggacttccggaaactgttcagcaaactccccgaagcagaacgcctcattgtgggtgagtcccggacccccagtcccagctcctagcccagccctgtgactctccgccagcccgcgggcgccggctgagcctcgtgacttgggtgtcctcctgtctctccccgcccctctcagattactcctgcgccctgcagcgtgagatcctgctccagggccgcctctacctctctgagaactggatctgcttctacagcaacatcttccgctgggagaccacggtgagcccgcagcggggcagggtacaggggcgggggcccccatggccaggccccaccccgctcctattgaccctcctgctgtcctcagatctccatccagctgaaggaagtgacatgtctgaagaaggaaaagacggccaagctgatccccaacgccatccagatctgcacggagagcgagaaggtgacggaggacccggtgacgggaccacgcggtcccccgctcagcaggccgcctcccccaaacatgcaaagccccatttgttctgcaccctgagttctctccgagctgtccccttctctctgttctcccggcccaggcgcccatcacccctgacctgatccccgcaccagcctctcctctctttccctgcaacctgttacctcacacagctgctcaggaacagcagaaatagtaaaactcttccatgtatgtggcacctcagccgcccctcccttcgtaagtctccccgatgttgtgtcctgtccctgtcattgtggcctcatgtccgttggttgcaagatggctttctcaccagcggtccaacaagaagggggacaggtgtgggggacacttcccagcagacttctctttgtgttttgttggttaaaagtggatctggccaggtgtagtggctcatgcctgtaaccctagcattttggggaggctgaggcaggaagattgcttgagcccaggaggttgaggctagcctgggcaacatagtgagaccctgtctcttaaaaagcaaaaaattaaccaggtgtggtggcacgcacctgtagtcccagctactcactcaggaggctgagacaggaggatggcttgagcccaggaggttgaggctgcagtgagccgtgatcatgccactgcactccagcctgggtgacaaagccagaccctgtctcaaaaaaaaaaaaaaaaaaaggatcaactgaccattcttagtggcaaaggaggctgggcaagttccctgggctccccccatcacatcccagcccctctgggctgaccctgtctagagatgcatctgtcccctccttggactgggagctccaaggacagggccaggggtcgtctccccatcccagtgattctggaattgtccagggcagggccgggcgcaggacagacgttttgtggaactaatgcaggggtgaattagtggattcatggggccaaagatgtggcgtcagcgcagatgagggtggcgcttccccacctctgtcctggtcgctccccaacctgctcacacctctctctctctctctccctgacagcatttcttcacttcctttggggcccgtgaccgctgcttcctcctcatcttccgcctctggcagaatgcactgcttgaaaaggtgggcctgggtgaggcccgggtggggatggggggtttccagggggaccatggagccagggaccccagaacttgcggagctggaggcagccctggctcttctccatgggcaccaggcccagtgcccctgcagctcctccctgggccccacctgaccccgaagctgagtctctggcaaagggacatgaattggtgtaaaccgtcgtaattcttccctggggctgggaatgattttcaccctgaaggacatccaggttccactggcagcgggggagtgtggatagaggctgggaggtcatcacaggatgccggctatggctggtccacagcacctcagagagccccagccccatcctccggctgagcggcactcacgcgctgccttctcagaggctccgatgtccctggagcaggcaggagtgctgagggtcccattcagcatcctgagagagggacagcgcacagtcaggccctaaggaggacagggcagagccccgggattccagccccatcccctggggcaagtgattgaaccccatctgtcaaatgggggccatccccacttcacagcacccagaattttgcccagaataagtactcagtcatgtcagctcttatgagcagagtagcccagcggttagctccctcgccaccccctctgccccccggctgtagaccagctcccctggggtcacatctcagcactgctacttcctggctggaccccagcatgtcaccttgcacttctcagcaccattgtcttaaaaggatgatgaggttagcacctactttccagatggttttgaagatacagtgagttagtacatctgtaaagtggttagaagaatgcacctagttgaccaggtggcaaatgtctgctgctatcatcacttactgttaactgtcatcactgtcattcagccactctggccatgggtggctgaaagctcaaggctcccgaggacacctgggaaaagattcggggggccacgatggcataggcatgggagactcagccctggagtctggcagggcttgaccaagtcacttggtgaccttgaacacatgactttccctacatgacttccccttcctgggactccgtatgctctgtaaagatgggaacattcatggctgggcacggtggctcatgcctgtaatcccagcactttggtagacgaagacgggcggatcgtggtgcccacgaggtcaggagttcgagaccagcctggccaacatggtgaaaccccgtctctactaaaattgcaaaaattagctgggcgtggtagcacgcacctgtaatcccagctccttgggaagctgaggtaggagaatcgcttgaacccaggagggagaggttgcagtgagctgagatcacaccactgcactccagcctgagcgacagagccagactccatctccaaaaaacaaacaaaaaaagatataaaaaaaatgggaacattctctggccagagtattgtggggacttgggaagcaggaagtttgagtcctgggcgcaggccctggaggggctgtagcaggggattccccgcttgctgaggccaggtctggtgcgggagatcgtggctgcctccttgtggaagccaggggaactgcggaggccgagggctggtggggaatctggcgggccgggctctggctggggtgagatggaggccaaccccaggtcccgcctccccagacgctgagtccccgcgagctctggcacctggtgcatcagtgctacggctcagagctgggcctcaccagtgaggatgaggactatgtctcccccttgcagctgaacggtctggggtgagttggaggtcaaaggaggttgaagggttcgggggagaacaggacggtcggcgtgcagagttcctggagtgctggggggcctgagatggttgtatgacgtctggaggattcaggagggtgtatggggtctcaaggacacagcagtcccgcttcctcccctttcccacaggacccccaaggaagtgggagatgtgatcgccctgagcgacatcacctcctcgggggcagctgaccgcagccaggagccaagcccagtgggttcgcgccgtggccatgtcacgcccaacctttcccgagccagcagcgacgcagaccatggggtgagcggtgggttggaagaggggtgggatactgataggaagagagaggagggctgggggtgcagtgggagaagaacagcctgacagatttggaggggaatggatagggggacaggggaggcctggatggaggaacaggacagggaggggaagacggacatgtgacagggaaagagagacagggaagagaggggacagacagaaaggatgagagacagaagggatgggagatgggtggatagatgaagcagcagacagacagacggacaggacaggtaagaaagcttatggctcaggcatctgagacaagcctggcaggggctgagaggggccctcatctgggtggccccaggctgctcgcagctcagccgtgagccctcggtgcacacaccaccccgggtctgcacaggctctggaatccttgtggccagtgtggacttgggagccctggggctgggatggaggtggccaaggctgcatcgggcctttctccacaggcagaggaggacaaggaggagcaggtagacagccagccagacgcctcctccagccagacagtgaccccggtggctgaacccccgagcacagagcccacccagcctgacgggcccaccaccctgggccccttggatctgctgcccagtgaggagctattgacagacacaagtaactcctcttcatccactggggaggaaggtgaggcaggcgggcccaattcattcgcctccggtacttgcaagcctcgctcagtcttaagcaagaggggatggattcgcccgcagcactgagaatccaggggcaggcgggatggcgttcaggcgctgttgctagaaatctctgtctttactctgttttgaaggcagcatggcagggtgaacacaagcacagactgaaggcagcttgccgcggttcacatcctggtcacaccacttcctgaccatgtcacgtgggcaaattatgtaacttctctgagcttgctttcctcctctgaaaatggggttaacaatgataatacccacttcataggattgttgttaagagactataaatgaggctgggtgtgatggctcacacctgtaatcccagcactttgggaggccaaggtaggaaggattgctagaggccaagagttggagaacagcctgggcagcaaagcaagaccccgttttgtacaaaaaagaaaaaaaagaaaaaactaggtgtggtggtgcacacctatagtaccagctacttggcagaccaaggcaagaggatcacatgaggccaagagtttgagacaagcctgggcaacatagtgagacccctgtctttacaaaaaatttaaaaattagccaggcatggggtcatgcaccctatgtagtctcagctactggggaggctgaggcaggaggatcgcttgagcccaggagttggaggctgcagtgagctatgattgcaccactgcacttcggcctgagcaacagagcgagaccctgtctctaaaacgaacaaagggagagaattaagtgatttcatacatttaaagcacttgggccagttagtaagcattgactattagtatttctattatcattattgtattcattttctctctccactaattttcagctagcctctattcttgtctcttatggggcagagatggcctcagccctgccccagaccagcccaatgagagagagcagcctatttttcctagtgtctacagcggacaccctagggttggctctgattgggccaacttgagagtgtgcctgcccctgaaccaatcactgtggttgatcggatagacctgggccacccactcacccctgaaccaattgctgtgcccctaggttgatgctcccaggaggcgtgctatctggtaatgaatccctgtgatttaaatctcagggcctaggtgtgttctccacccagaaccaagcacagtggctgtctgtctgggcctggagcacgtgcccaccctcaacccatccctgagtcacaggagggctctgtgtcagtgtccagctgtgctccaggaggtggggtccgcccatgcacactacaaggcctgggagtggggaggcgtggcccgcagagggagggaggagtggaggcagtcatcatcctcggctctcctctgtctccagcggacttggctgccctgcttcccgacctctccggccgcctcctcatcaactctgtcttccatgtgggcgctgagcggctccagcagatgctcttctcggactcgcccttcctccagggcttcctacagcagtgcaagttcacaggtcagcgggcgcatgaaggagaggctgaggttacccaggtgcaggggaggggtgaggaagggtagcccaggacaggggaaggcactgctagccagtggggcaaggcgaggtggtgaaaagcaatgtctgtcagaccagaagcagctctgccacttactagctgggtaggcttgggcagagttctgagatgctctgtgcctcagtttctccttctgtataatgggggtatgataatagtacctggcttattggttatcatgagaactaagtgagttcatactagaaaagttcctagagcaataccatatagtaagcgtttaataaatacaagttaagaggctgaggcggggctggtgcggtggttcacacctgtaatcccagcactttgggaggccgaggtgggcagatcactagaggtcaggagtgtgagaccagccagggcaacatggtgaaacctcatctctactaaaaatacaaaaatcagctaggtgtggtggcacacacctatagtcccagctacttgggaggctgaagtgggagaattgcttgaacctcggaggcggaggttgcagtgagctgagatcacactgcactccagcctgggtgacacagccaaactctgtctcaaaaaaacaggggcggggggtggggtgctgggcacagtggctcacgcttataatcccagcgctttgggaggccgaggcaggtggatcacctgaggtcaggagtttgagaccagcctggccaacatggtgaaaccccatctccactaaaaatacaaaaatattttagccaggcatggtggcgagcacctgtaatcccagctactcaggaggctaaggcaggagaatcacttgaactcgggaagcagaggttgcagtgagccaagatcgtgccgttgcgctccagcctgggcgacagagcgagactctgtctcaaaaaaaaaaaaaaaaaaggtgggaggagggccaaggtgggaagttcatgtcagcccagaagttggagaccagcctgggcaacataatgagactcagtctttacaaaaataaaaaaaaaaattagctgagcatgatgctgcccacccgtaatcccagctactctggaggctcaggtgagagaattgcttgaacccaggaggtggaggttgcagtgagccaagatcatgccactgcacctcagcctgggtgacagagagagactccattaaaaaaaaaaatgctcctgaggcctccccagaagccgagcagatgtcggcatcatgcttcctatacagcctgtggaactgtgaacccattaaacctcttttctttataagttactgagcctcaggtatttatagtaatgtaagaatggcctaatacagagctcctcagcctgacacgccagcccttttaggacataagcatagttttgggggccttgtagccccccaacacaaggcaccatcttcctgactgcaggggatactgcatgtctcatcaatacagaaaaagaaacaaagagaaactcccatctgacacgctcctcccctgcttgaatctcttttgtagcctcccaagttccttggctggtcccatgtcaacccttcagcctcacccagagctgtggctgcccctctccatacctggctgccccatcccagcctcaggggacttctctcaatattggcctccagcctcagggcctttactggtatcacgcggcctcctgggctcctctgccccgaccccttccttcctcagttcctccttcaggccttggttttgatttcacatcctcctggcagccttcccttaccttcctcagatcccagatacccccagatactcacagcttctgcccttaactcacaccatgccagtagtgtgtggtttttatttatagatatttcctgttgttctcaagagattctgggtgctaaggacaggagttcatctatcctggtctcccactggcctccaagccctgcataggcctgacagagtggacattaaatttgtgatcattaacacatatttatttatttatttatttatttttgagtcaggttcttgctgtcgccccagctggaatgcagtggcacagtcttgagtcactgtagcctctgccttctgggtttaagccattctcctgcctcagcctcctgagtagccgggattataggcgcccaccgtcacgcccagctaatttttgtatttttagtagagacggggtttcaccgtgttggccaggctggtttcaaactcttgacctcaggtgatcctcctgcctcggcctcccaaatttcccgaagtgctgggattacaggcgtgagccactgtgcccggctgcctcagggagcttttgatcatgctgaaaggcaaagggggagcaagtgagagagagtggaggggaggtgccacacacttaaatgaccagatctcggaagaactcactatcatgaagacagcagcaaaccatgagggatccgcccccatgatccaaacacctctcaccaggccctacctccggcattggggattacaattcaacatgagatttgggtggggacaaatatccaaactataccaaactcagactctgttctaggggtactggggagccatggagtgttctaggcagagaagggatagagtcaggcttggctttaacaagatgcccctggaccagatggggagactgaggccagacactcaagggaaggctggcaggggcactgggcaggcaaagatgggctgaaccaggagtgacgctcaggaggtttggtgaacacacagtgtaggtaaccatctaggggtttgagtagggggtgtccagggcaaggcctaccgctccagtgggagcctggaggaccctgggccacccctgagtgggggcctgggagatgcagcaggtttggggagatgctgaggctgtgtggagctcggtgggttcgaggggtccagggaccttccaggggaaggtgttcaaaagattacaggtccaatgctcagggcagaagccaagacgggtgcagagggggaaactgaggctgcagcagtggaggagatggccctgccccaacagctaaggttttaggctcctggaaggaaggtggggacacagaggagtggtggggattgggacaggtccccagagagacctcccagaaggctgagtctcctgtggcctgtgggcaaaggactggggtgtggcctcctcatgctgctcctccctcctctagacgtgacgctgagcccctggagtggggacagcaagtgccaccagcgccgggtgctgacgtacaccatccccatcagcaacccactgggccccaagagcgcctccgtggtggagacacaggtgggccaggtggggcagccgagtgggtggggcagctgggtgagtggggtggccctgacttctccggctctgtccctgcagacgctgttccggcgcggcccccaggccggcgggtgtgtggtggactccgaggtgctgacgcagggcatcccctaccaggactacttctacactgcccaccgctactgcatcctgggtctggcccggaacaaggcgcggctccggtgagtggtggctgggcccctccacccgatgccctggtggccccagggcctcctgtccactcctcaagtcagcagcagagccttggttcccaccctggtggaggaacagaagcgtggggttcctgaggcccttgtcctccgaatagtggagggtagaggaagagtggccctgggatggctcctcccatctacagagggtgtttgagcctcaagactctgaggatacagcaaagccaggcaatatcacctctctcagggagctcatattctagtggggaattggacaatagagaaatgatcaggaaaatctgcagaacattcactggcagttaggcctatggagaaaaatgaggaaaacacggcaggctaaagaagcagggtgtggaggcttttacacccgacacgctggtcagggaagggcctactgggaaagaaatgtttcaccaagaacctgaaggagctgagagcaactcatttgggacagcaggtgcaaaggccctgaggcaggggtgtgggcaatggctggagtggagtaagattgagtgagtaggagctgagattaaagtggtgaaccggggcccggcacagtggctcacacctgtaatcccagcactttgggaggctgaggcaggagtatcacttgagcccaggagttcaagagtagcctgggtaacgtacggaagccctgtctctacaaaaacaattttttttaaattagccagggtccaggtgcagtggcttacgcctgtaatcccagcaatttgggaggctgaggtgggcggatcacttgaggtcaggggttcgagaccagcctggccaacatggtgaaacccatctctactaaaaatacaaaaattagtcgggggtagtgatgcacgtctgtaatccctactacttgggaggctaaggcacaagaatcacttgaacctaggaggtggaggttgcagtgagccgagatcgggccactgcacttcagcctgggtgacagagtgaaactctgtctcaaacaaacaaacaaacaaacaaaaaacaagttaaaaaattagccagacatggtggagatttcagtgagccatgatcacaccgttgcacttcagcctgggcgacagagcaagaccctgtctcaaaaaaaaaaaaaaaaaaaaaaaggtgaaccagatgtggctcatggtgaagacttgactttacctggagtgaggtgcaaccaggccagggctctgagccaggagggcgctgacctgactcaggtggtcccaggctccttctggctccctctgttctggtgggaacagactgcaaagacaggtacaggagcagggaggccagggaggaggctgctgggacatccaggctggaggggacggaggctgaatcagggtgaggaaatggagggggaagagtttagattctggagagattttgcaggtttagctgacaggatttgctgagagattggatgtggcggtgagggaaagagagctcaaggaatatcccgaggcatttggcccaaatcactacaacttcggagctgcccttgacccagatgggggcggcagggaggaatgggtttggggaaagaccaggaggtcagtttgggactcagctgtctatgttgagctgagcccatgtggagctggggtgcagcagccgaatggaagaggttcaggggcatggtctggttaagacgtcagtctgtgagtagacagggctcaggccgccgggagcgttgcccaggtagtgggcatgggtggagaaggaccgagggctgagttggctggcatttgggctgggcgggtggtgtatggggtatccagggaagccatggggggtagggaacccatctgttttgtctgtgagtgacaaggggccctctctgaattaggggaaggaaaaaactcagcttgtgggacggggcagccagggctggagtcagacccttacctccttcccctgatctcccaaccccagagtgtcttctgagatccgctaccgaaagcagccgtggagcctggtgaagtcgctcattgagaagaactcgtggagcggcattgaagactatttccaccatctgggtagggacagaaggccggctggggcgtgggttgggggatggcctggccaggtatggacatccagagccccctctcttttacgcagagcgagagctcgccaaggctgagaagctgtctctggaggaaggcgggaaggatgcccggggcttgctatccggcctgcggcggcggaagcggcccctgagctggcgggctcacggggacgggccccagcacccagatcctgacccctgtgcccgggccggcattcacacctcgggtacgttccgttggggccgggttggggtaggcggaggatcgggggtcctggactgggccatctgactccaagctgctctcctgcaggctccctcagctcccgcttctccgaaccatctgtggaccagggccccggggcaggcatccccagtgccctggttctcatcagcattgtgtgagtaagagacaggagcagtggccacacaggcctgaacctgcctcctggctgtgtgaccttgggcaagtgtgtggcctctttgagctctctgcttaagtgggagcgtgggtttgctcacagcaaggattagacaaggcaatgtttgggatgtgccggtttgtcatggagaagccttccctgctagaacagcagagccggggggggctatgggagatcagaggggcctgacctcacccaaggatcaaggggggctttctggaggagcaggcacacaaagattctggaattaggtgcacagggagaggtgtgcctaacaagtgaggtcatttatggacattatgttctctgtgcccactcctaagctgggcgatgctgaggacaccgcagtgaccttgaggaaaagatagacctcacaccagaccagagtgatccgggctgggatgggggaggtatgggcagaggggttggggctgggagtggggaagccctgggaggccagcggcggcttcctcccaggccagagggggcagtcaggatgggcgtcctgagagagtggagaccgcgtaggctaagggcttgggcagggagaacccacactcctgcccagaagcctgcaggagttggcgggcaggacgctgggaggaaacagaagcaggatcccggggttgagcagaccctgcgaggtgagggtcaggccagctacatgctcagcctctgagcctcagctctcagctctcatccagtgagggggcgtggtgctctcagccaagagctgccccgggtgaggagggctgggggtgtcgggggcaggccaggcggcgctcatctctctgtctcccctcactgctgctgctgcaggatctgtgtgaggtagggtcccgagtcctccccctgccctcccctccctgcaccccacccctgctgcagcctcttctccccaccccatgccccccagctcccccagggaggtggcctggcatggcagtcaagggtatgggcatcagacagacctgggtttgaacactgacttccctgctatggactgtgcaaccctaggcatgtctctcatcctctctgagcctaattctcctcctctgcaatgggggatagaggtgtccctacaagatgtagttgtttgggggtgttcagagcatctagaccccaggaatcctgacctctgacccctgtccccagccttatcatcctcatcgccctcaacgtcctgctcttctaccgcctctggtccctggaaaggacagcccacacctttgagtcctggcacagcctggccctggccaaggggtgagtgggtagcctggggaaatgggggggcttgggcacatcgggggaggccaaggccctgctcaggcctggcatccccacagcaagttcccccagacggccacagagtgggccgagatcctggcgctgcagaagcaattccacagcgtggaggtgcacaagtggaggcagatcctgcgggcctccgtggagctcctggatgaggtaggaggcgccgctcgggcagggctcggggctgcggggctgcagggtcctgtgttgaaaccccaccgtgcggcaggcacttcccctctccggatctcagtgtcctcctctgtaaaatgaggaagccgctcagagtccccaccccacagcattgcaggggaaagcatggaagcatggatggaagacagaactgattggctcacgtcctggagaaaagtccagaggcgtctcacattaggcacggccgggtttggtcactcaatggcagtaagagtcagtctctcgtgcccactctgccctgtgcccatctccagggttggcttcattggaggccacccttttccccccacaggggaccacggagcttactctcattggctgctggggtcccaggcctacccctgacacatcacaacagccagggcaggccacgtgtggtccctctacccgctaccccactctggggtaactaaggggtcacatggtctgaaggggagagactctccaaaggacctgaggtctcatctccaaaacggagtggacccagacacccagtgtagttcagggacaatgtctactcagacaaccaggttccaattccggtgtgtgacctcgtgcaagtgattttgccatggtggccgtggactcctctgtgcacaggataatgactgatgctacctcaaagactgttgtgaggatgagacaagttgacattgggagtggtgccaggcctgcaggaaacactggatgtgggctggctgtcctgagtttgagcctagtgccagggacaaagcagatgcccaataaatgtgatgtcatcacacgacaattccctcaggccccagtagactcaggccagcagttgcggtgggtcagagcaagtgtcaggccagcagttgcggtgggtcagagcaagtgtcaggccagcagttgtggtgggtcagagcaagtgttaggcactcggggaaggtgtcgagggggaaagcggatgggaaacagagtctggcattgcctgcatttccaaggccatcagagctgaagttgtgggtgacggtgaaaatcttgtctcattggacccttccatatcagaaggctcatctttaggggtctcattgccccccgaaatcaagcttgggagaggctcacactggaaagggcggggcaggatggggtggggaggagatgaaggctgaggccccatcactcatagagagggtaggcagggccccccatcctgcgttattttattttattcttttgagacaggatctcattctgttgcccaggctggagtgcagtggcacgatcatggctcatcgctgcctcgaactcctgactcaagtgatcctcctgcctcagcatcctgagtagctgggactataggcaggcaccaccacacctggccaattttaaaattttttgtagagaccagagtctcaccatgttgcccaggctggtctcaaactcctggcctcaggcaatcctcccgcctcggcctcccaaagtcctgggattgcaggtgtgatccaccacgcctggccctgagttaaatttttatcattttcctctctgtcaaactgctaagggtgcagagttgacgtcacagattggtgctcacagtagatgtagactgagcacttacctgcagctgggctgttctaggttttaagcatgactgctttatccccacagccagcctttgagaagatgctcttgttatcccagtttttttgagacagtctcgatctgtcacccaggctggcgtgcagtggtgcgacctctgccttccaggttaaagcgattctcgtgcctcagcttcccaggtagctgggattacaggcacccgccaccacgcctggctaatttttgtatttttagtagagacgggctttcaccatgttggccaggctggtcttgaactcctgaccttaagtgatccaccggtctcagcctcccaaagtgctgagattacacgcatgaggcactgtgcccggccgttatcccggttttatacataggtaggcgatatgaggcatccagaggttcgaggagctcaggagcttgcccgaggtcacagagtgggtaatggtgacagctaacatgtgctgagcacttagtgtacaccaggttctcagtgctcttcagaaccctgaaataatcctgtggagcagatgtgttatagacccgtatttcaaatgaggggattttggctcagggtggttacgggacttgcctgaggttaactgaggtaacaagcagcagagccaggatttgaacctaggccatcggggtcacaggcacacactaagccccttcctctgctgcctctgagaagttaaactgggtgcagcatggctgtgctcttttcaccaagggaccctggggtggggcagtatggcctctagaccgtcctcagtttctcaatggcaaggtgggggtgggcgacatcaccccccagcctccagcgttcacccccgaccctgctcacctcctccccgcagatgaagttctcgctggagaagctgcaccaaggcatcacagtctcagaccctccctttgacacccagccccggcccgatgacagcttttcctgaggaccccggccacgcagctgttcccccacatggacagatggacacacagagcctcggcggccactgctggcacggtgtgagcgccaggcatctcccacccgcccctcccgacggcccaaccaggggctgtgcagacgtggggaccacggaaccgagatgcactttagaccagggagctggcccggcctctggcaggccccccactaacttattttgcccggctgaggttgtggggggcgcctcctggggtgcacgattccctcagctctgggtttaatgtattatatttatttggggccgacagtgccccaataaagggtcagaagtggctgtggctgtgcctgtggggccctgggagtgggtgggagcctcctgttgcactcagatcctgccatggtggggaggggacctctgtctgtgttctggggccatagtcactgaaacgatctggaattcccgcagcatcttacacaagctttacatcatctgaggtcaacgcaggaactccggggacagaccgtggtagctggagttcaaatcctgcttcctagcagtggtgtaaatgcagcaggtcagccccctggagctccagtgagctttcctgtgcaatgggtagaatggcagtagctgtctctcagggttgttagaaggcagtggttctcaaacttgagctgcattcgaatctcctggagagcttgatgaaaaacagactgtgggcccctccctccaaatttctggttcagtaggtctggggcagggctgggattctgcctttataacgagttcccaggagttgctcatggtgccatcccagacgacactttggttttttgtttgtttgttttaagttagggtctctgtcgcccaggctggagtgcagtggcacaaacatggctcacagcagcttcgacctcctgtgctcaagccatcctcccacctcagccttctgagtagcttggactacaggtgtaagccaccacgcccggctaattttttatttctttttggagatgggatctcactgtgttgcccaggccagtcttgaactcctggcctcaagcgatcctcccgcctcagcttcccaaagtgttgagatttcaggcgtgagccaccacgcccagccccagaccacactttgagaaccactattataggttcaaggagttcataaatgtggctacttataacagggcccggcacagatggaatggagtaagtattcaataaatgttacacttattgcataaaaatagagggaaaaaagtaactcgcgtagtgagtaccaagtacgtacgtacccagctctgtgccaagatctgatgttcattttattctcacagtgattccatgaggtggagacaaagatgtacacgcccgaggctacccagcagggaggcagactccaggcctgacccctggggtctccacatttacatgcaaggtcctaaccccctcaggaccccaccacagcccattcaggctgacgttggttggattcctgttttacagatgaggaaatgagcttggaggcaaagtccctggtccagaaagaacccaggtccacctcacgcaaaccttgtcctggttccagagggagtatgtggggtagagacacctttggcatgtcacacccccggctataagaatcatcctaactgatggcttggagcaggggactggaggagggtttggagagtggatcaggagtggcataggaggcagagccagcctctcctatcctctagttgtgtgatcatggcaaggtacccatgctgagcctcagtcttctatatctgtaatatgggtgtaataataataccacctataggaaaaattaaatgagctaatgttagtaaagtgcttagaatgcttagaacagcaccaagcccatacatagtaggtgctcactgaacatagcttatagggccgtgaggtgcctcctgtccagtgctgaggcctgtcctcactgtgccttcacctaccatcccccaccagtggaagggcccggaacagcaagagggttattctctgcaggggaatttcacagctcagaaggtgctggcgtaaaagtctagaccacagaggtgtcggatgtccctggctccctgcccctctgccatggtcctgccccacaccctggctcctcttgcctggcagggctgggccagggggattctgagaccttaccccacccggaattggaggctaggatctgggtagtgacccttcagccgagagtctcactcccaccctggtcctgacagcccagaactcccatctccattctctcaatttggcagaacctactggtaggacaggccactcaccactgctggggcaggattccacatccatcctaggccagctacatgactctgggcaggggcacggccctctcccagcctcagtttcttcatctgtaaaatggggataatagaacttgctgaaggtttggggcagtagaagtgggttctgcaaatcccaaggacttagtgaacattggcattcatttatttgtttgacaaatattgattgagtacctacaatgtgccaggaacagttcaaggtgcaagagacacaagacaatatcctcacctgggagattttttttttttttttttttttttttttttacatggagtctcactctgtcaccaggctggagtgcagtggtgtgatctcggctcattgccacctctgcctcccgggttcaagcgattctcctgcctcagcctcctgagtagctgggactacaggcatgtgcccccacgcccagctaatttttgtatttttagtagagatggggtttcaccatgttggccaggatggtctcgatctcttgacctcgtgatccgcccacctcggcctcccagaatgctggaattacaagcgtgagccactgcgcccggcctttttttttgagacggagtttcgctcttgttgcccaggctggagtgcagtgatgcgatcttggctcactgcaacctctgcctcccgggttcaagcgattcttcctcagcctcccaagtaactgggattacaggtgcccaccaccactcccagctaattttttttgtattgttagtagagacggggtttcaccatgctcgtcaggctggtctcgaactcctgtcctcaggtgatctgccccccttggcctcccaaagtgctgggatagcggggggcggctcacatctgtaatcccagcatggtcaacatggtgaaaccctgtctctactaaaaaataaaaaaattagccaggcatgatggtgcacacctgtactcccagctacttgggaggttgcggcaggataatcgcttgaacccgggaggcggaggttgcagtgagacgagatcagccactgcactccagcctgggcaacagagccagaccctatctcaaaaaaaaaaaaaaaaaaaaaaaaaaaaaaagaacataatgtcaggtagtgaggctgctgtggaaaacactcaacaagaggtaaagagtaaaggaggtcaggttaggagcggggaaggcagtttaccctgaagggacacagaagacctgacgaaggtgacattggagccatggaggcccacggagaggggcggggcagggggggagagccggggcagaggggagagctggggccaaggccctgaggcaggaacgggttccctgtgttgggaacagcaggagggcctgaacagccagagtggagtgggaggaaagaggggtagaaggtgacatcagggacataaatgggtgcaggggatcacgaaggggtcctcctcctgaaacagcacctccagattcccggggctgcttctctccagggtgccccgcctgcttgggtgaggtccggattgtagctgtagtcctagcctgacggccccccaccctcctctaatgcctacttggggtccctgcacattgacccccaggcctggatatcagggctcaggggagataacttggaggttcgccctctggaactcctgaggatgacctccatcatttgaagtcggaaacccggcccccaaactgcgctctaagtcctcctgtgactctgggggtgacctttccagactccctgggaaggtgggggggggggggtggtcctcagagccccagcggggtcggagacacacagaccaccctccccgttcccagaagtcgcggtccctgcgccacccggagaggccggtgcagcgggcgcctcccgggccgctgcggcaaaggctgggcggccgcgccttccccccgcggtgattcatcccgccccctccctctcctccctcgtccctccctaggccgccgccgccgccgccgccgccgccgctgcagtgcgcaggagaccgcggtccgcgcccgagcgcgcccgagccggagcgggaccggggtcggtgcacctagcggatgtgcccggctgcgcgcgccagcgcagcagcccgagcagcggccgccgcccgcgcggcggggatgcccggacgccgggccccggggctgggcccccggcggtaaccggagcgggggggccgcgccccccctcctcccccctcgccggtcccagagccgcagctgctgcgcccgcgcgctcccggggacattctaaccgccgccaggtcccgccgcctctcgccccgctattaataccggcggcccgggaggggggcgcagcacgcgccgcgcagccatggggaggctgctggccttagtggtcggcgcggcactgggtgagtgcgcggggggcgcgcgcggccggggggcaccgcgggggcactggcggggcggcgggagtggcgctcgggacacggggcagccgcgcgagggccacccccggcccatccccgggccccgccaagtcagcttcagaagttgtgcgcgcgggagccgggcttggggagggcagtggaggtgagggtgggctccagcgggtgggggccgggctggcacagcctggcggctgcaggcgcccagccgggggcgaggaaacgcggagtcagctgctcccggagccccgcaggctgcaatgtgacacccacagccgcgggaggggggtggggggaaggcggcgcccggagactgggacgggaaagacggagggacagggagagatgaagacgggaggaagggggcgagagacagagaaggactcggagcgcaccggagtggtccgctgggatgctggggacatgggggtcaagggggagacggagacagagagaggggtattggagagagagagagagagagagagttaagagactgagcgcgatggagaaagggaaacttgagaaaggcagaaggagatggagagaagagagagggagatgcgggtgcccgtgaacaccgggagagaatcttgcatggagtttgaaaagggatagacgtagaaaggtggaaagagattaggagaggtctccttctgagcccagagagtggacaaaaagtggagggaccttcagagagacccctgagagggacaaagataggagggactgagacagaggccctcagggagtctgaaagggaccgcaggggaggcggatggatgagaagtcctgaggatcaggaaacaaggacagcacagggctgcagcagaagagacacagcgttagctacagagtgctgggaggcagaaaggaggtgccaggtaagagtgtgaaggaattctaagactggaattcagtgggctgcaaaagccctggggcaggagagagctcaggaaagctttgagtagtggatggggttggggtgggaagagctctagaggcgaggagcctggggaagaggggatgatggaggcaggagaggccggggaggggatggctcacacaggggcttgtgggctgtggagaggggctgagtgtgggtcagccccggtttcagtgcccacctccccacaatcccccacccccagaccttttctcccaacccatttctcctggagctagctggttttacaatttaatggtgaaaatgactgccaccttaaacttctaacttagctggaattctcattctaccacctagatgcttgggttcctccagcaagggactttctgaggaaggggcactcgggtagcataaagtctgagttaccggcaacgttgacagtcccacttatggggcctcccatgtacaaggccctacctaatgtatgaaaatgggcccagccattgctggaagcaaaggaccatttctttcaacaagagagagggaaactgagactcagggatgaatgacttgctgaggtcacgcagtgagtgacagggctcagcctagcatccagtcctgtctgctggtaatcattgaggggggaacagatggtttgtgaggggtctggcattgcttagggcaatgggtgcctctgcctgacctgagcctgctgtccccacagtgtcctcagcctgcgggggctgcgtggaggtggactcggagaccgaggccgtgtatgggatgaccttcaaaattctttgcatctcctgcaagcgccgcagcgagaccaacgctgagaccttcaccgagtggaccttccgccagaagggcactgaggagtttgtcaaggtgtgcgggtgccgggaacgggcatgggagggcaggggtccacgagtgggaggcggtggggctggatctcagggagggggcttatttgtttaataatatgctgtgattgctgacctggattcagattctggctccaccagtggccagctggtgaccttggccaagtcagtgagcctctctgaaagtcagtttcctcctcggtaaagacggggtggcggtggtctctagcccataggtttgtgtgaggactgaatgcattgacgcacctggcacacggttggcatgaaataaatgtcagtggacttatttggcaccagcaaacaatgtctctgatagtcattacggagggaagacagaactgttttttttaacctcctttaaactatgtgtgtattttgcattatatatcggtgagggaaccataaaattctgtgacgtgctggagagttggggtctccagctgctggaatcaggctgccctgtctctgctggaggagtgtgtctggtggctgggaaagaacggcagagaatgatagcctagaggccagatggggcttgggaggatgactgaggaacgtgtgtgtgctcgtgtgcatcttggctagaggcaaaagcggggtctggttgactccaggcgtgatcctagccccccacccctgtgccctccctgcctgaggtcaaggtgtctgagcccatctgtgtgccatctgtgtttgtgggtgtcagggcaggggacagaatcagggtcaggtaagggaagagaggcccaggcagtgacaccttcccctccctggctacccctagatcctgcgctatgagaatgaggtgttgcagctggaggaggatgagcgcttcgagggccgcgtggtgtggaatggcagccggggcaccaaagacctgcaggatctgtctatcttcatcaccaatgtcacctacaaccactcgggcgactacgagtgccacgtctaccgcctgctcttcttcgaaaactacgagcacaacaccagcgtcgtcaagaagatccacattgaggtagtggacaaaggtgagtcgggtgctgcctgcccctttaccgtcacccaccggagagccagatggagggacagatggcaggcagtggacaggacaggctggctctgtgcctggccagccaaccgcccacagcagcgggctgagggggaggggagcagcccctcctgcccactccagctctggcctctgtttctctccagcccacggagaggtcaaagcatgcctgtcccccacagacgctccgggtacagaacccagctctgtcacctgtgctgtatgacctctggcaggtgccttctgtctctgagccaaagggttgtcctgggcttgcccgggataataatccgatgtgtttctcggggtgtggtttgagccattcttccatcatggggttcatgaggattgagcagctgcaggcacacgcctggcttccagcagagccttgcaggtggtggcgagggtggcggttcttactgttcgagtagctcagccctgctgccctctgtggtgatgaggcaagagagcgtgccacctagagcagagttccgcacacccctctgcactcctgccccgggggagccgcgctggcctgcagtctcactcaacacctctggggcgggcctaggggtcctttctaaagctctcaggtgaggcagtgaagggccacaggtgcggggcccaccctctgagcagcaagggcctacagcgcttttgaacgtctcatcattttgcctcagccaccctggaccccttttctgagggaggtccgccccttctctgatccatcttctgctcagcatcaattgcaattgtccagcgccctgtggccactggcttagagttggggaaacagcccaggccttgaagcagctacaagccgtggcagaaaggtctctcagggccacggcacacacatcctcatgggcaacacgcactgcccatcttttctgtgagatgggtgccggcctcagtgccttacacggagtcccttagtgaatcctctccccaccctctggggtaggggctcttcctatccccattttacggatgagaaaaccaaggctcagggagggaaggttatgtggccaaggtcatgtgattgggagctggacttgaatccagaggagcttgggtgactgtgtttctgttcttggcatgattcactgtactctgtgatcagccagagcctgtgggtttctttttataattagcatttttacgtttattgtcaaattggtgtagcagaatgcaattcagcaggcatgtctgagccactctggtgtttgtcacgatgctggggggtgggggtcacccgcagacatggatgatggagccccgcctgcggagttgctgtgacaaagatgcctgcggtactgggactttacaaaacctgtgttattgctcttgcaaatctgcagaggtgagatggggagagggtgggaggctccagggcactgttcagccacccaggttctttccatcttgttgtttggcagttggccagggtgttgtgtcctctgtacgccgtgacccaatagagcctctttttttttttttttaaatttagatttttattttttgagacggagttttgctattattgcccaggctggagtgcaatggcgtgatctcggcccactgcaacctctgcctcccaggttcaagtgattctcctgcttcagcctcccgagtagctgggattacaggcatgtgccaccaagcccagctaatttttgtatttttagtagatatggagtttccccacattggccaggctggtctcgaactcctgaccttaggtaatgatccacctgccttggcctcccaaggtgctgggattacaggtgtgagccactgcgcctggcctgagcctctcttttttaggattgcccactgtatgacactacatcccacagcctgtgctattaccagcatttaccatcatatgcagttccttatgttggccctgcagagtttgtgttttctgcactatccacccagttctagtgttttttacccaccatatgtagtattgccttttaaacattacccactatattatagtattttatattacccactataggatattttatattacacaatatattttactatcataatattgccaaacacaacagttttttgttttttgttaaagagaccaagtcttgctctgttgcccaggctgggatactgtggcgtgatcatagcccactgcagcctcgaactcccgaaatccagcgatccttctgcttgagcctcccacgtagctgggactacaggtgtgagccactacgcccggcaattttttttttttttgtagagactggatcttgctatgttgcccaggatggtcttgaactcctggcctcaaataatcttccctccttagccgccgtaagtgccgagattacaggagagagcctccgcgcctggcctacagtatttttattataatccatcatactagcgtatttttaacgttccccaccatggcgggtatttttattacccaccatgctatgctatagtatttcaaaaattaatcctattgtagcatgtaaaaatattccattctataccatactatattcatcattacctctgatactacagtatttttaacatgactcattgtgctattgtattttttcattacccacaataccacaatattactgtatttgttagcactgcctgccattccttattattattatttttgcaatggagtctcgctctgtcacccaggcaggctggagtgcagcagtacaatgtcggctcactgcacctcccgggctcaagcgattcttctgcctcagcctcccaagtaggtgggattacaggtgcacgccaccatgcccaactaatttttgtacttgtagtacagacggggttttaccatgttggccaggctggtctcgaactcctgacctcaggtgatccacccacctcagcctcccaaagtgctgtgattacaggcgtaagttaccatgcccagcctattattattattattattattattattattatttcaagttagagtctcactctgtcacccaggctggagtgcagtggcacgatcttggctcactgcagcctccatccacctcccgggttcaagcgattctcctgcctcagcctccgaagtagctgggattacaggcacgcgccaccacgcccggctaattcttttgtatttttagtagagacagggtttcgctatgtagaccaggctggtctcgcactcctggcctccagtgattcacccaccttggcctcccagagtgctggaatgacacgtatgagccaccacactgacctttttattatttttatccaccatctcgctgcaatttcagtattgcccatcgacctatattgcctcctggtaatgacccctgaggaatgagccatgccatttccataggtggaggcgacgggtcatggtggtgagaacttcactgacctggaagaggtggagaagatgctgggaagctgctgagggctgcccacctgtgttaggagaaggcagatggggacccatggggacagtaatactattttggatccacacaacgggagtggaaaatgccttgaggcacagcagcgtctgaggcgggtgagaaatccggcctgcagagtcgcggctggccttcagatctgcgggctgcctgtgagatgccgtgttacctaaatccatttgggcactgagttccaggagtgggggcaagaattccgatgacggggctttatccggtgcgcatccagctcagagtggttcctgagaccagccaccatgggcagccaggatgtgctcatccttgaggctttccgaggcatcaaggagatggttggataaagaatttagcacagagcttgactgatggcaggcgcccacaacatgagacacattaataatgtgtgtggaggccaggtgtagtggttcatgcctgtcaccccagcactttgggaggcagaggtgggaagatttcttgaggccaggaattcaagaccagcctgggcaacacagcgagacctcatctctaccaaaaaaaaaaaaaaaaaaggaaaaaattcacctggcctagtggtgcacacttgtagtctccgctactcaggaggctgaggcaggaggattgcttgagctcaggagttccaggctgcagtgggctatgattgcatcactgcactccagtctgggcaatagagcaagaccctgtctcttaaaaaaataaagtctgttgaaaagaatgaatgaaggaaggaaggaatgagagggaaaccctgtctcagctcctcccgcagggaagctggggcagggcaggcagggggggcatccggccccgctccctcccttactctggcccagaaagcactggtgccatctgcacagggtggagccaaagaaagtgccccactcacagcagagggaggccatttgaggacagcagggaaaatgggatctcagccatctaggagggggccagagatgtgggatggacacctaggaaatccagccgaggacaccagagtggcttttgactctggtcccctggctgaacgcgttccctttacagtttaaatttaggctcaaggagaagaagctggcaatcggcagggccagtgctgtagagaggatgtagggtttccggaaaatagccaacacttcagcagtgctggctgcgagctcatccaagcatgttacgggtgttaactcatttcctctccagcaaccctgtgagagggtctgagtgttcccatctccattttacagaggctcagagaggtgcagtcctttgcctgaggtcacacagctagtaagaggcagagccgggatttgaaccctggcagtctggccctagagccccagctgttaaccattaggctttatagccccagttataacaacaataataatactaatacaagtgaaccttcactgagtgccatttatagatcaagcactattctaaggattttaaagcatatttaattctcacagcactctgatgaaggaggtattcattttacaattgaagaaacagaggcctagagacattgagtcacttgcgcaaggtcacacagctggccagtggcagagccagcctttgaacctgagccttctggttgcagagctacggcttttaggcaccgtgctgagggcctccagaatgacacagatgtggcctcgagttacacagggaggcaggttgagggtgacccccaccaggcctacccaaggctgggtattaataatcacagtgcatacaccaggcccagggaggttgagccactcatccaagctcacacagcaagctcacagcacactcaggctgtcatgcagcctgggctacccccttaaccctgcctggcccctgcagccaacagagacatggcatccatcgtgtctgagatcatgatgtatgtgctcattgtggtgttgaccatatggctcgtggcagagatgatttactgctacaagaagatcgctgccgccacggagactgctgcacaggagaatgcgtgagtagggtggctgggaggtgggagggcacccagggcaccgtcacacttgccagagaggaactccggagcccgggcagggaggaggcagcggagcggcccagggcgccatctctcagtactacccagaggggagtgctccctgtcagacacaggataggggtcgtcagacccagccccttcctccctccaactcaggagcccaggctcccagccagattcctcaaagaccctgaggagtccacccatagactccttctctctctaactaaggagccctgtgtacctggggtggagaccgctaccttcccccatcccccgggggttgggtcggtctgatgatggggtcactgtatacctggcctttcccccacagctcggaatacctggccatcacctctgaaagcaaagagaactgcacgggcgtccaggtggccgaatagccctggtaaggcggatgggctggcagaggggaaggggattgggaggggccgaagtcccccaggtccctaattccccctctcttgctccccttcaggccctgggccccgcctcaaggaagagccagccgtaatggggactctccaggcaccgcctgcccccagcgtgggggtggccactcctgggccccagaaagcctcagagtcctgccgacggagccactggggtgggagggggcagggggcttggctcgcacccccactttcgcctcctccagctcctgccccgccggccgcgcaccgccatgcatgatgggtaaagcaatactgccgctgcccccaccctgcttctgctgcctgtttggggaggggggcggtgaggtgggggcagcggccccgcacccctcctccttgctgatttgcacacattggccgcttcagacacgcacttctggggccagcccctccccgcctcctccctgcctggcggcaggggtcgcgatgatgggctggagcagtttggggcagggggttctgggacccactccgactccccctccccggcatcatttcccctcccgcttcctccggctggacctggggtcccccctccctgtaatgcactcctgccccggcccaacctcgccctctctcaccagccttgaactgtggccacctagaaaggggcccattcagcctcgtctctttacagaagtagttttgttcatgaaataaagactcttggacttgatgcatagtttcgattgtgagccccgtcaccttccccccattcccgtccccgaatcttcgagcccgctttccagggaccctacctgagggcccacaggtgaagccacttagtgcctgatctgtgtcggggttgggggagccatgggctcaggggtgagggagagtggaacggagccaggaagggagggggtgccgtggagggaagagaatcgaggctgatgctggggtgcaggggtggcatggggtgtgtggtgtgcccagcagtgtgagtctctggagaggtgggcgctggggagaaggagagggaaggagagacgggtatggatggaaaggcagaggaagccaggctaaaccagcgtgtcccaatgaggggccctgggctgagtggaggaaatgggtgcggtggaggtgggtttggctgggcacagcgggcacgtgtgggtaagcgggtggggccggttgtgcgggtggcctatctggggcaagcagccgaggccgactgtgtccggcgtgtggttgagcacgggcaggtgtctggcggtgaccctgcacgtctggtgtttacctggccctgggtctgacgtgggccgcgcctggctgctggcgggacagtgtgttatctgcctgcggacgcttccggccacttggcctgggcctctgcccttagcgctgtgttttcccggccaagccccccatcccccctatctagtgctaggactttctggctccagaggtcaccgcggccgggcggaggctgccaaagcaaaccagccccgtgacttgtaggaagccagcgggggaggggccggggcaggatgagcagggcaggcgggagaggctggggctggggttggggcccaggaattgggcagggaattaggcagaggtgcagcaagtggcgggcacagccaggacctggggctggaggacgcagaaagggcggggggaagggttcgctgggtgagggtggagtgggcttagggcagctggggccctccatctgatctcttctggtcagacccccacccttcagcctgcactttctccctaaacccccagcctccggccaggcctgtccctgttcccacatccccgcagacaggcacacctgggtccccctggaggtccaaggcaagccccgtagctgggcccgcctggtccagcccccacaagcccggccccatcagccaggtggcctccagtgctgccaatcgaatggtccggcccctccccgccccttcacccgcccctcgcccagccccctcctcctcaggtgaggcagcctggcctagcaggccccacgccaccgcctctgcctccaggccgcccgctgctgcggggccaccatgctcctgcccaggcctggagactgacccgaccccggcactacctcgaggctccgcccccacctgctggaccccagggtaaggacaagggcccccagactcacagttccagccctgaggacaggggttccctcatccccccacccagcctaatgcccacctcctaatagaggggttcctggggacctgaagagggggcactatgacgtccccccaagcacctaggtgttctgtcctgctcttccttcagactcagccgttggaccccagtcctttcctccccagacccaggagttccagccctcaggcccctcctccctcatactagggagtcctggcccccaaattcctcctttcccaagacttatgatttcaggtcctcagctgtctcctccctcaaaccgggatcctcagtcccctgctccaccaggctcaggcatgggggtccccatccctgcaaatccaggcgtccccccgctgctggtcagacactgaccccatccttgaacccagcccaatctgcgtccgtgatcacggcgtgctctggccaaggcccagtccctacagcctgcctggatggacgcctgggactgggggcgccaggactgggctgggctgggctcccccaggccctgcctccccgtccatctcctcacaggtcccaccctggcccaggaggtcagccagggaatcattaacaagaggcagtgacatggcgcagaaggagggtgagtccccttccctgagccccagctttggctctgcctggcgccccgccctctgtgctcttttctctaccctctactcttcggagccccctctctctgggcacccctcccagatgcatccccacccctgttagtcctcctccacctgattaactattaaccacattttctgtgcagctgtgccaccaccagcctcccttctaccctatgtgaccttcctggcgtgctgcctcagtttcccctcatcccccagtgatttctcagctaactctggacttgtcctctgctggggctgaggcggggaagctgtagctgtcatggttaaggacacagatttggagtgaaacacacaggcttgcatttgaatttgctcttgccatcttttttgctgtgtgatctggtgcaagtgacattattcttagggctttggtctccctctgggtcaagcatggataccagtcctccctctgtgaggttgctgagtgcatgacacacaccaggcactggtctggggctctgcatataagacgcatgccatcaagcagagctgtcatgacagaggttggcaaactcggagtcccagagacccaggacccccaccgatcccagacattcctccacctcctggctctgtgggcaaaagagcagagggaggactttggactgggcctggatggatggagaggggagagacggcagagaaaccaccataaggatgagagagagagactgcgtcatggagttgctggcccttgggagtctctgggcagcccccagctagcctggcttcctttctacctctcacacatgggacccagctggaggggcgcatggaggggcgtcctgttctttctgccttcccctagctggggctgactccctctcttcttccgcaaccaggatagccgggctcagtcctgggcagtagcactttctagctgtgtggccctgggcagacggcgtgttctccctgggcctccattctctcatctgtgaaatggagagggtgacagtgcatgtccaacagcgtggggcgaggcctgaaatgccaggatgggcaggaagcactgagcgtgttggctgaaatgattagttcagatctctggcctcctcgggtctcggcacagctggcaattcagaccccaaaccaatcagctgcagtccagagggaacccaggctcccagttactcaggagaaggcattgcaccctagccgagcaggtggatgacagaatccagctccttggggacaatctctttcctggagctgccggaaggacagccccagggcttgggcccatgggtgaatgagccagggaagaaaagcagaaaatgcccgaatggacagagatggcctgggtacaaagagaaacagacacaaagtgggctctggtgcctccctggcagctccgggctggtcttggaggggagtcctgctgtcagggctaggggtgtggaggtcgaacctggacacagatgctgaagggttccgattctgcacttacttgccgggtgacccgggtttggtggctgccggactttgggcctccttttctcatctgtaaactgggggtgatggcaatggcgccttcctcgtgaacagctgcaaggatttaagtaaggatgctgtgcaggactggacggggttagggtagggcggtgcgtccgtgtgtgattcagagagccgttgtggctgcagcggctgctgttgttggtgtcactgttattgctgctggcttcttggtgctgcctggaaacttggaattggaggaggtgatactggagttgcaattccaaggatgccaggcagagggaagagcaaggctcttgctcttctctgggaagctgggaggtgacacagcactggtgtgcacgtagccaattgtggtatttctggaggtgaagctggaagttgagctgggtgggagaagaggtgtgcaagctggaccaggcaggggtgggactgttttggggaagagctggccaattccttgcagtaccaggtctctccacaaggtggcgccagtggttagtccctgcttctcttgtctaacttgtattttacaagttctactgtttgggttgctttttggaagctctctctggtacctgatagtgacccacatggttgtctgagaattgggggaaacatactcccaaatctctgaaagccatgcttataccctagtggggctggaaatgccaggctgagggacttaagctgtctggggggtactagggagtcacagagggttctataggtaaagaggggacaggttggatttggtgtctcagtaggttccccaagcctccgtgtggagggtgcgctagaagggagactgagcccagcggttggatggggccggagcaaggtgcagatggagagaaagaaggaaacgggggaaggagagtcactcaggaggattggcaggctgtcgggggaggggaatgttatgcagatggggatggtcctaggagtgagggcctctgagacaggaccgggaggaagaatatacttggggagacattggggagacattctgggacctggtaggggcaaagggactaggaggtcccagggaaaggtatttaaaaggtatttaaaggactgcaggagccctgacctgggacctggaagagggtctagggctggggacagaggggaaactgagtccacagaggtgggtgagacagacttaggggcaaggaggagcagggggaggctgcggccagccctacaaactctggattttacggagtaggtagagggtgggtgaagacagcagcctcagaggcgggaaggaaaatcaggtgcgcctggtgtcccagaagtccaaagaggagagcatttatacaggaagctgcagtcatgtaagatgaggcccgagacacggagccaccagttgagtggattttcagagccagagagccaaaggtgttacgcgtgggggtctttgcagccaaatggtggaggcggaagaactgacctatgagaagacccaaggcatccagaggggcctggagaagcaggggcagagagtctcagggagatgtaggggtgggggaggtctggcttaccaagggaaatagccctgctgctgggatcaaagaattgatgttgacgtgccgcctgtcccagtagagacacgcagggaggatgaggatgcgtcccacaccctgggccagatgaggatgctgcctgtcccagtagagacacgcagggaggatgaggatgcgtcccacaccgtgggccagatgaggatgctgcctgtcccagtagagacatgcagggaggatgcctctcatactgggggaaccccaggatgcagatgcttcctgtcccactggaggcgctgaagtcctctgaaccacacagcatggaaggaggttcttcctctcaccctaggagacacatacatagtggcattgcttcctgtcccaccagatgtgccaaggcctctaggctgcattctgcatggcctagagccctggcaggcacagctgaaaacaaagcaagcaagaccagcccagtggctgtcgggagccaagacctcctgctggaacctggagagtggtcctgggcagagttggggggcaggcctgagaacccctcgcaggacaggcaggggtcagccggcagtagttgggctggtctggcccactggggcctcttttggggaagagagtgtttcctcatgccttgatgggagccactgagctttcaatttttttttttttttaatacagagtctcgctctgttgcccaggctagagtacagtggcgcaatcttgattcactgcaacctccacctcccgggttcaagcgattctcctgcctcagcttcccgagtagctgggactataggcgcccgccaccacacccagctaatttttgtatttttagtagaggcggggtttcaccatgttggccaggctggtcttgagctcctgacctcaagtgatccacctgcctcagcctcccaaaggaccgggattacaggcatgagccaccatgcccagcctgagctctcaaattcttaagacacccagataatggccacaccaggaaggtcctagaccactccctgctctgttccaggtgctggcctggtgccgggttcaccagccacatcaccatgggtgcagatgggcgagctgggagctcctgccaccttggggtgctttgcggctgccaagggcagttgaacccaagccaggcccagctgaaggctttcagcagcctttactctttggccttcttataatccctagtgaaggggttggcttttatttatttatgtatttatttatttatttattttttgagacagagtctcgctctgtcgcccaagctgaagtgcagtggcgcgatctcggctcactgcaagctctgcctcccgggttcaagccattctcctgcctcagcctcccgagtagctgggattacaggtgcctgccactgcgcccggctaattttttgtattcttagtagagacggggtttcaccgtgttagccaggatggtctcgatctcctgacctcgtgatctgcccacctcggcctcccaaagtgctgggattacaggcgtgagccaccgagcccggctaggagttggcttttaatctccaggacctctttgccctgggaataaaatcccttttcctgtgccaccaggcctccccagctggccccagccttggttcccactaccttccccaagctctggccatctggccatctcgatggcctctccagcctctgacataagagagcctgcttattcttgcctcaaggcctttgcctgtgctgttccctctgcccacagtgcccttccttgtggtctgtgtgtggctggcacctcacctttcagagcttagctcagaagtctcctctaggggaggccctgtgatccctgatcccctgcagaagcccacctgctgccccagcctgcacggttttcttcacagcctctgccacaatctggaaattattgggttcatttacttgtttccttgttaatgtctcccactccccacctacacgcatgagaacgtgaacccctgagagtcgtaaccttatctgtcttctttgggttatgttcccggaacctagaaaggtgccaggcacacagcggatgttcagtaggatggtaaacaaataaagcttctttaggctgatgaaaaaactgagggtcaggcgcggtggctcacgcctgcaattccaacactttgtttgggaggctgagacaagcagataacttgagtctgggagttcacgaccagcctggtcaacatggcaaaccccgtcaatacaaaaaatacaaaaattagccatgtgtggtggtgtgcgcctataatcccagctactcgggaggctcagaattacctgagcctgagcgcttgagactgcagtgtgccatgatcgcgccgctgcactccagcctgggcagcacagtgaaaccctgtctcaaaaaaaaaaaaaagaaaaagaaagagagagagagagaaaaagaaagaaagaaagaaagaaagaaagaaagaaagaaagaaagaaagaaagaaaaggaaggaaggaaggaaaagaaaaaaactgaggctgaggctcagagaggggaggggagttgctcaggcccacacatctctgatgatttataaagcatttatagagaacttgctatgtgccaggcacttccgcacagtgagagccaggatggcttcgtggctgtacacaggggacctggcatcaaacctgcccagggttctggacgctgctctgcctcttccaggctgtcactgtgggcacgtgaccccacttctctgagctatctcaaaaacaggaatcatagttgtgggattgaaataaggactaaatgagctgatgtatttagaacggtgcttagcacctggaggcatcaatacaatttgagctattcttcttcttcttgaaaataactttaaattattatttttagaagtaggtgctcagtggatgcccatttaatagataagaaagttgaggctcaaagatatgatggcacctgccttaggttccagctaggaaggggtagggtcaatatttttaaatgaggctggccagacgcagtggctcactcctgtaatctcagcattttgggaggctgaggaaggaagatcgcttcagcccaggagtttgagaccagcctgggcaacatagcaagaccacgtcgctaaaaaaattaatacataaaataaaatgaggctggcagattttcaagtggaggggcaaatttgatcttgcaactgggtaccatgagagaggtctgatttagggggtatctaggggcaaagcatctagaacagcagaaacgactgaggcagcgaggaaatgccagcggcagggaagagagctaccaagagggcaaaggttgggggtcacagtcccaagaagagatggcccaaagcaaagacagaaatacaaaagcacagtgtcactggggaggagacattccctaagtgccaggaaagtgcagggcggaggtggagaccgtggcaggtggcccggccatgcccccctcccagctggaaccctgggggagctgggcacctggttgttcacacggcaggggaggaacagccctgtcaactgctggccccgggaaactgggcctggggaggacatgcttgggcataataagttagccctgggggcagggcagagctggcctcgggcccagaccctgccgcaatgaggacaggcctggctgtggccccagcatggtgtctgttgcaggtggccggactgtgccatgctgctccagacccaaggtggcagctctcactgcggggaccctgctacttctgacagccatcggggcggcatcctgggccattggtgagagcggttcctgtgcctctgacctcccctggcccctgcagcctccagcctgcctgccctcacccctcccttctctgcagtggctgttctcctcaggagtgaccaggagccgctgtacccaggtgagtggagcaggctgggaccctctgggggagccctggaggacacgtgtatctggcgggagctcaacaagcgtatttgttgaataaatgcacaaatgcatgcagaaatgctaatcataatagtgcatttgtattgagtgcctgctatgtaccaggcactattctaagcaccccacatgtctaacccagactttttcagacaccagtgtattactcatgagtgcctcataaaattaaattagtgagttggaaaaccatgttttttttttaagtatgaaatagattcgattacagactatcacagtacatctctcagtaagtaaaggttatgctaatttttgtttgtttttttttttttttgcatccatatacatgtaatcccactgcatccccacactctgagggtgggactgttattctccctgttttacagatggggaaactgaggctttgagcaatgcagcagtttgccccagactacagagctatgggctacatcaggatgtaaaaatgtgtttcttactgcgtggcatggtgaaaacatgttggggaggcatgatataaattcagtggacccttctaactctcctaggaggtagtttttttgtttgtttgttttaaaaaagaaaaaagtcttgctctgtcacccaggctagagtgcaatggtgcagtctcagctcaccgcaacctctgcctcccaggttcaagcgattctcctgcttcagcctcccaagtacctgggaatacaggcgtgtgccaccatgcccagttaattttttgtatttttagtagagatgagatttcaccatgttggccaggacggtctctatctcctgaccttgtgatccacccgcctcggcctcccaaagtgctgggattacaggcatgagccactgcgcctgtccctggtaattagctccattttacagatgtgcaaaatgaggaccagagaggacatgcagctggggaacgaggggccaggaacagctcttagacttatccactgtaagtgtgtctgcaggcatgtggaatgaatggccacacaaataaatagataaagaaactaactgtgggatgaatgaatgaatcttcccaaatgccaacttcaagctgccattccctgatgcaggacagcaggaaaaaaggggaagttgggtggtgggatgtatttttcatgtctgtgagcctcatctaattccataaaggattcagttcacactaaaatcagaaatgaaaatccagacaagaaaagccaacatcaacattaatcatcattaccagcacttagcatttgtatgcaccagccaaggccttgggaccttatgatatcaactcattaagtcttcccaacaacctgttgtttttcttttcttttttttttctttctttctttctttcttttttttttttttttttttgagatggggtcttgctctgtcgcccaggctggagtgcagtgacacgatcttagctcattgtaacctacatctcctgggctcaagcaatcctcccatctcagccttctgagtagctgggactataggctaatgccaccatgcctacacaaaattattttgtcaataacaaattattgttatttttatctttttgagccagagtctcgctgtgtcgcccaggcaggagtgctgtggcgcgatcttggctcactgcaatctccatctcccaggttcaagtgattctcctgcctcagcctcctgagtagctaggactacaggcacgtgccaccacacccagctaatttttgtatttttagtagaggcggggtttcaccatgttggccaggatggtctcaaactcctgacctcaggtgatccacccgtctcggcctcccaaagtgctgggactacaggcatgagccaccacacccaacctcattttttaaatttttagtagagatgggatcttgctacattgcccagtctgatcttgaactcctgagctcaaagcagtcctctcagatcagcctcccaaagtgcagggattacaggtgtgcaccaccacaacccattttcctatggggatgctgaggcacagaaaggctgagtgacttgccccaggtcatggagctagtcagtgtcagggctgggatttgaacccaggcagcctgcgtagtaactgtatatagtgtctacacttgattgcttgttaaaaaaaaaaaaaaagaacagctgaattcattgccatagtaaagactgacatatgccaggccctggcggcagcctttacccagcaggcctatgaagttagggctgttacatcccaacattttgcatttgggggaaattgagtcccagtgaagcaaactgacttgcccgaggctgaccacacatcagagacagagcgaagggatcacgcccctgtcaaaagcccctccgtgacaacacgtggcattgagataaaatcccaacccatcacaggctccaagcctcctagtgtggaggcccctctccacccccacctcacactggcttctagcaccctcagggcccagtcccttgctcaaatgacctgctcacacagaagtctctactcacccacttctttctagctcacacccagaggcagatttcagttctgcacagttccttctgagctgtggggcctcccaccagtccctactctctccaagactcaatttcctcatctgtgagatgggggtaagaagaatcagtgggaataagaggagataaaaatctgtgtagtacttgggcggggtgcggtggctcacccctgtaatcccagcactttgggaggccgaggcaggcagatcacctgaggtcaggagttcgagaccagcctggccaacgtggtgaaacctcatctgtactaaaaacacaaaaattggccaggcgtggtggcgggcgcctgtaatcccagctactcaggaggctgaggcaggagaactgtttgaacctgggaggcgcgggttgcaggttgcagtgaactgagatcacgccactgcactccagcctgggtgacagagcaagagtctgtctcaaaaaaaaaaaaaaaaaaaaaggctgtgcagtacttgcctcttagccagcacagtggacattggcttttgtatctcactcctgaaattctttcttgaaatttcttgagcaagatcttcctggacttccagactctatggcctctcaccctatggtgtgtccctgccaccccggtaaaaccctcctcactcattgtgaattatttactcctggcgaactccaggaaggcagggaccttttgtggtcagacggtgcctggcacatagtaggttctcaggaaatccttgagttatgagtgcacccaaagccaaaacactgggatgaactagagagtcatgggcctccagctggaaaggagcgaggccaccactcacacccggctctggccagcaccacgccgccaccctgcagaggtatttgggtttttcaacaactcagggaaatgatgaaacaaacaaacaaacaaaaacaaccccaagcttgtatccccacctcgctttttttttcctgggattttcacacttctaaatatatccaacaacttggcaggcacaccaggtgacccagaacatcctttttgtgttgcctgaaatgataggaacaagaataaagaatttaaaagtgagaaacagcagcagagagtgtgactttaaaaatagccagaggggacatttgatgttctctccccactcccatctcccccaacacacatctataaagtgattttcccccctaaaacctcacactttctggaaatcacatttccagagcagttaacagtcattttaaaataagaatccacccctcttcctgccccagctggtgtttcaaactccaagccttggctttcatggggtgatgaggaccccccagctagaggtgccaggcattccctgccccaaccccagagcaggagaccgtaattaaggcaggccaggccggtgcggtggctcacgcctgtaatcccagcactttgggaggcccaaatgggcagatcacttgaggtcaggagaccagcctggccaacatggcaaaaccccatctctactaaaaatacaaaaattagccgggcgtggtggctggtgcctgtaatcccagctatttgggaggctgaggcatgagaatcgcttgaactcaggaggcagaggttgcagtgagctgagatcgtgccactgcactctagcctgggagacagagcaagactccatctcaaaacaaacttaaaatagaataaaataaaataagaatccgcccccctccccgccccagttggtgtttcaaaccctgagacttggccttggaattcatggggtgatgaggaccccacagccagaggtgccaggcgttccctgccccaaccccagagcaggaggccatcattaaggcaggccagccaggtggcttttcagtgccagccgtagctgaatatattaggcagggagacaggcaagggtttgtatgagacccacagaaggaacagggaatatgctggtctgggttcaagtcccggttttgctggttagccgtgtgcctctgggcaagtttattcctctgaggcttagttttcccatctgtaagatgggcatagaagtggtcactactggctgggcacagtggctcacgcctgtaatcccagcacttggggaggccaaggcaggtggatcacctgaggccagaagtttgagaccagcctggccaacatggtgaaacgctgtttctactaagaacacaaaagttagccaggtgtagtagcatgtgcctgtaatcccagctactcgggaggctgaggcaggaggatcgcttgaacctgggaggcagaggttgcagtgagccgagatcatgccactgcactccagcctgagcaacagagcaagattatgtctcaaaaaaaaaaaaaaaaaccgaagtggtcactatctccgaggatggttgtgggattcagagagccacttggataggatgcatagcatggggccagcccactgacaccccccagtaaacgtagccagtgctattattactgtgctgttgtttaaccctccagaggggaagtctcttgagaggctgtccagggcaatgttaaaagcttggggtttgaagtcactcagacctgatttcgaatcctctctccctgcttctcgtgcatttggtgacgttggggaagccaccccacctctctgagcctcagcttccccgtctggaatttggggatgatcttcgtggctcctggggtgtgcgacgaggccttggttgatggtggggcagaggtagcctagccccaggaacacagtaggtcctcagctggggagagttctacttggaagtcttgcttctccttgtcccaacctgcggggctgtgggaagacccctcagctggtgtgtggcctcaccaggttccttctaagaggatgcaaaagcaagttttcatttgactcggtttcccagaatgtgctctcagagcccaggccaggcaggaggctcttgagaaaaggacaaaaagacatggtggctcacacctgccatcccagcactttgggaggccaaggtgggaggattgcttgaggccaggagtttgagatcagcctggacaatatagcaataccctgtctctacagaaaaaaataaatttaaaaggcgtttttagctcaggctttgctgggttctaacctggctattgtcactcagctttatcctaacataaaaaaataaacaaattagcagggtgtggtggtatgcccctgtggtcctagctacttgggaggttgaggcgggaggatcgtttgagcccaggaggttgaggctgcaatgagctatgatcgtgccactgcactccagcctgggtggtggagcgagaccctgtctcaaaaaagaaaaaaaaaagtggcagggagaaggaaaggaaaggacaaagaggttcacagctgatctctccctgaacctgctccttccgtccccatctctgtcagccccatcttttcaggctcaggccaaacccctcggttaccctcccagttcctccagtcacccatgaatcagatcttgcaggaaaccctgtcagctgcacctacagaacctctccaaaatctgaactcttctccccgtccactgcccccaccctgctccagcccccttcccctcccctctggacatcccagagcctcctccctggcctccctgctcccatccctgccccccaatcatatcccacaaaggggatatgactcactcacttaaccggcaattctggagggtcttaaaacctggctgcctcaagaggctttaaaatgttatcagatgggggccaggtacagtggctcatgctggttccccacttgcagccagagggagctggtgaccacctgagtcaggtcagggccctcccctggctgcacctcacaccaggtgccagcaaagccctgatgttgctctatttctagctcccacctgatctgcccctccctggctcactctgctctggcctcccactgttcctggagcactccccccagtcccccacaccagccttgggatctttgcatctgcaagtccctctgtctccgtgctgatctcacacacctcctgacactttctcacctcctgcaggtctttgttcttgcaccaccttcccagggacgctctccttgcagcgactgaaaagtgcaacctcaccccaccctccatgccggcactcccctccctcggtggcattttatttttctctgtggccccttcctatcttgtgacacataatatatcctacttatttgtccctttcttgatttgtctcacctactgagctttgagttccacaggggtcggggtttttgtctgatttgttcattgcagtggtgatttgttcactgcctaaaatagagcctggcaggtacaaagtgtttggtaaatagaaatcaataccccagggtctgtgacctgacttaggtgttaacaggttcctctgaggtgtgtggggaacagactgaggggtttcaggggacatctgttctcaccacaaattgccccccaaccagccccagacatgaacagtctcccgggagctccctctagccttctcgtatatcccagccctgcctcatgtcacaatttgtaatgatgtgtttggctgggtgacattttatggccatctgtctccctatcccctataatgtggtttgccgaaagcaaagcccaggactgtctcggccatctgtgtctccaggatcacccctcactgggcatggagtatgtgtccagttaacgcttgctgagtgaatgaatgaatactccatcctctgcctggagaattacgcactttagcatatccaaggctctgacaagtcctgcataaaagagcattattgttttctttctttctttccttctttccctcttcttttctttctgactataggatattgattatcaatctggcaatagtcaagattggcagtctggtgtattagtcaaaggttttcagcctacaaaagacaaaaagaaaaaataaactggctaaaaacaaaaggggatatgatttactaactcacttaaccgacagtcacagaggttcttcaaacctggctgtatcaaggggctttaaaatgttatcagatgggggccaggtgcagtagctcacgcctgtcatccagcactttgggaggccaagacaggcagatcacttgaggtcaggagttcgagaccagcctggccaacatggtgaaaccccgtgtctactaaaaatacaaaaaattagccaagtgtggtggcatgtgtctgtagctccagctactcgggaggctgaggcaggacaatggcttgaatccgggaggcggaggttacagtgacccaaggttgcaccagtgcattccagcctgggtgacagagcgagactctgtctcaaaaaaaaaaaaaaagttatcagatgggaaatgaattccgatattaaaaattgatatgtatttatactatattattaaagttatttttcataaaacatagaagggtaagtttaagaaatgagaagtatttataccaaaatgattaaatattatttaatttaaagatataaatgtcttgttggacaaataattcaaaatttccattagacaggaaaaataagttcaagagatatattgaacaacatggtgattatagttaataacaatatattatatacttgaacattgctaaaagatattttaagtgttctcaccacacacaaagggtagtgcatgtgttaattagcttgatttagccgttccacaacgtatacatatttcacatcatcttgtacaccatcaatgtatataattttgtcaattaaaataaatacatattttaaggccgggtgcagtggctcacacctataatcgcagcactttgggaggccgaggcaggcagatcacctgaggtcaggagtttgagactagcctggccaacatggtgaaaccccatctctacttaaaatacaaaaaaattagctgggcatggtggtgcatgtctgtaatcccagccactcgggaggctgaggcagaagaatcgcttgaacccgggaggcagaggttgcagtgagctgagattgcaccactgcacaccagcctggacaacagagtgagactccgtctcaaaaaaataaataaataaaaataaaataaatacatatatatttttgagatggagtctcactctgtcgcccaaactggagtgcagtggcacgatcttggctcactgcaacctctgctgcccaggttcaagcaattctcctgcctcagcctcccgagtagctgggattacaggcacctgccatcatgcctggctaatttttgtagttttcatagagacgaggtttcatcatcttggccaggctggtcttgaactcctgaccttgtgatccacccatctcggcctcccaaataaatacatattttaaaagatagaaatcactctggaaggagagttaatctgtttgatataataataataatatattaatattatattataacaatatattagtattatattctaataatatattaatattatattataataatatattattatattataacaatatattaatattatattataacaatatattaatattatattatgtaataataatactactccatatagctatggaaaagttcatatgaagaaaccaggctatgatctacaaactggcaacaaatttgttcttctattttccatatgctgtctgtgtacgtataaagtgagaggtctttttatatgagttaagggtgtgaccaaagacaaatggaaaaagacaaatgacaaacatactaataaagagcttcggtttctccacaaaaaatacaataataaaataaaatgttatcagaaatctcttgactctcctccacgttagctcactttttccctcaagagggtgaacatgacccttaacagatccagcctcaagtgctggattctcttgggaacttggttaaatggttttttttcttcccgaatgtccaagtcaccttccagacctgcagctcctgagcagccaacttaggacttctaatggagagtgaagttcccctggttcgcggaggggccggccacagcctcaaggctgctgttgattggtccgacctgagtccttgagtctggcagagtgccatggtgctctgtaatcccacctgtaatcccagcattttaggaggcagaggcaggaagattgcttgagcctaggagttcaagaccagcctgggcaacatagcaagacccgtctctacaaaacaaaacaaaacaaaacaaacaaacaaaaaaattagtcaggtgtggtggtgcacgcctgtggtcctagctactcaggaggttgaggtaggaggatttcttgagtctgggaggtcaaggctacagtgagccaagatcacaccactacactccagcctgggcaacagagcgagaccctgtctttaaaaaaaaaaagtccttgagtcatgattccagatgcaatcgcagatgtgggggctgcaaccctccgatgggctggggttcacgtctacaccacatggctggagcacaggccaggaggggctccggctggggaagcatgtggggagcctggctgtgggacccaggcggccccgggccctgtcgccctgcagtgcaggtcagctctgcggacgctcggctcatggtctttgacaagacggaagggacgtggcggctgctgtgctcctcgcgctccaacgccagggtagccggactcagctgcgaggagatgggcttcctcaggtactgggggccctcggaggggtgggagccgggaggggctggggagcaggcctaacccctgccccgcccagggcactgacccactccgagctggacgtgcgaacggcgggcgccaatggcacgtcgggcttcttctgtgtggacgaggggaggctgccccacacccagaggctgctggaggtcatctccgtgtggtgaggagggcagcgggcaggtggggcaacacctcagacccccaaggcactccctctccccgttttccttccacctgtcttaactggtctctatttcctttctttctgtgtctccaatcccatctctcccagtgattgccccagaggccgtttcttggccgccatctgccaaggtgagatcctaaaactcagaaccctctcctttaggcccttggggaggccacgtcccctcaagctccccaggatggggccatgtactttcagaccccctagggcagggccaagcctgggctctggggacctgggctccagtcccctgtcgccgccccctgctgacccttgtcccacagactgtggccgcaggaagctgcccgtggaccgcatcgtgggaggccgggacaccagcttgggccggtggccgtggcaagtcagccttcgctatgatggagcacacctctgtgggggatccctgctctccggggactgggtgctgacagccgcccactgcttcccggagtgagtgccccccaatggcgctgatgatggggaggcagaggagcggagagacagtggggaggagggcggattgtgcccaggcaggtggccaccctccacccctttccctggtaggcggaaccgggtcctgtcccgatggcgagtgtttgccggtgccgtggcccaggcctctccccacggtctgcagctgggggtgcaggctgtggtctaccacgggggctatcttccctttcgggaccccaacagcgaggagaacagcaacgatattgccctggtccacctctccagtcccctgcccctcacaggtaagtctaagggctgagccatggggcttgaggacccgaggccaggaggacagaggaggggaccaggggcacaaggcaatcaacttatggctcaggcatccttggcaataaggggaatgatctcgagggagcacaaagtgggccttaactatcaatgatcagtgcagccaatttggaaaatttgccagcatttccccaagaagtatacataaagttaccattggacccaacacttccactcccaggacaggaggtatatacctaagacaaatggaaactgtgtctgcaccaaaactcgtacatcagtgttcatagcagcattattcataatagcccaaagatggaaacagcccaagactgtttcatcggacaaatgcataaagaaaatgtggtatattgaccgggcgcggtggctcatgcctgtaatcccagcactttgggaggccgaggtgggtggatcacgaggtcaggagtttgaaaccagcctggccaacatggtgaaactccatctctactaaaaatacaaaaattagcctggccaacatggtgaaactccatctctactaaaaatacaaaaattagcctggccaacatggtgaaactccatctctactaaaaatacaaaaattagcctggcgtggtggcacacgcctgtaatcccagctactcgggaggatgaggcaggagaatctcttgaacccgggaggtggagattgcagtgagccgagatcacaccactgcactccagcctggctgacagagcaaggctctgtcatcttgaaaataaataaataaataacaaaaaaaatgtggtatatccacacaacgggagaatattggaccatagaaatgaatgaggtactgattcatgctaccacaaggatgaaacttgagaacagtgctgaatgagacaagccagccgcaaaggccacatactgtaggatgccacttgtatgaaatgtacaaggctgggcacggtggctcacgcctgtaatcctggcactctgggcagctgagatgggaggattgtttgtgctcaggagtttaagaccagcctgggcaacatagcaagaccccatcacttaaaaaaatgagctaggtgtggtgacggatacctgtagttccagttactcaggaggctaaggcaggaggatcacttgagcccaggagtttgaggctgcagtgggctaggattgtgccactgtactccagcctgggtaacagagcaaaaccttgtctgttaaaaaaagaagaaagaaagaaagagaaagaaaagaaaggaaggaaggaagaaaagaagaaaagaaaaggaaagaaagaaaagaaatgtctagaataggcacatcggtagagatagaaagttgattgatggtggcagggtgggaggtggggatgggagattgggaggtgactggtgaaggacacaaggtttcttgtctgggtgatgaaagattctaagtcgatcatgatcatggttgcacttgtctgtgactacacaaaaagccagtgacttgtgcctttaaaaggaattgtctaatatgtgaatagtagttcaatcaagctgttaccaaaaaactaataaaatgaaaagaaaatgtgttaaaaatgaatgaatcagacttagaaagtaagttaggagtcattccctctgcaattccctggagtattcccttggtcttactgagactcacttaggtgccaacatgtccttaacacctctccaacacatacatcttccttttggattaaaagcaggccctgggcttcagatttcagcaggctgcagtgtaataataataataaaaataggctgggcatgtaatcccaggccaaggtgggggtatcgcttgagctcaggagttcaagactcgcctgggcaacatggcaaaaccccatctctacaaacaaaaaaaattagctggctgtggtggtgcgcgcctgtggtcccagctacttgggaggcggaggcaggagaatcacctgatcacccaggagatcaaggctgcagtgagccatgatcacaccactgcattccagcctggttgatagagcgagaccctgtctcagaacataataataataacggtgataatgatgatcatgaagtagtaatagcgagtagtattcgagttcatgattgagtattcgagtatagcgagttcatgatcatgaagtagtaaaagggaataagggagtacatgatgagtgtacacaacacagtaaaataatctggtaaacatagcagtgtgccaggcaccattccaaatatgtcctgtgtatggactcacttagttctcacagcaaccccagcacaccctggtaaggagggttctcttaagatcctgttttccacccaggaaaaggtcccaacccaaagaaggcaaacaatgccccaaattcgtacagctggtgaacggcaaagatttgtgcccaggtggactggcactggaatctgtgcttgtggcccccacgctgtggtgacggagaatccagggccatgttggggttggcattatgtttatttttatgtttattttatttttcatgatctgtggtactggtttcccattgaagggagtgatacatgcttttctttaaaaccaaaccctgtcctgacatggtggctcacgcctgtaatcccagcactttgagaggctgaagcgggcagatcacttgaggtcgggagtttgagaccagcctggccaacgtggtgaaaccccatctctactaaaaacacaaaaattagccaggtgtagtggcaggcacctgtagtctcagctactctggaggcagaggcaggagaatcacttgaacccaggaggtggaggttgcagtgagccaagatcgttgccacacccttctccttagtgaaaagagtgagagagttaatattgaagtaaggacgcatctttgaggacaggtggacaggtggaagcggctgggatttcagacacagggctgagggggtcacagcatgggctttggggtcagattcagatatttgccaactgtgtgatcttggacacatggcttcacctcaccgtgcctcagtttcccttatctgtaaaatgacttcctagggttattgagacaattaaaagggttaatatgagtaaagagcttagagaactgccagcacatagtgaacactggtaaatgttagcaattgctactattgttgtttaatacttttactagttatatgaacacttgctgtttgcctggcatgcaactcaatgactcaccaatttctcactacaacttctggggataagtgattattatttccattctacatctgagagctctaagactcaggcaggtgatgtcatcagcaggcagcaggcagcaggcaacaggcagggctgccaggaacccttgcataggttgtgcactgcacaaggacaccacatctcagggttaccactctctctgtagacctgtgtatttattattatgattttctgctaggtggaagtcaaatgtctcaagataggagtgtctctctctctctctctctctttcttctctctctctctttctttttttgagacagagtcttgctctgtcacccaggctggagtgcaatggcgcaatctcggctccctgcaaactctgcctcctaggttcaagcgattctcctgcctcagcctcctgagtagctgggattacaggcacctgccatctgtaatcccagtgctttgggaggctgaggcaggaggattgcttgagcccaggaggtcgaggctgcagtgagccatgttcctgccactgcactctggcctgggtgacactgcaggcttagaaatgaaaacaagctgtgttaaaacatacatgttatgaaactttggacacgtgacttggcctcattttccccctctctaaaatgggataatatagaccctacctctctgggctgatgaaacattaaagaaaatggtgcaggaaggcgcctagtatgcgatgagctcttggtacgtggcgacttccgttgtggcttttttgtttgtttgtttgtttttgagacagagtcttgctctgtcgcccaggctggagtgcaatgacatgatctcggctcactgcaacctccacctcctgggttcaagtgattcttctgcctcagtctcccgagtagctgggattacaggtgcgtgccaccatgcccggctaatttttgtatttttagtagagatgaggtttcgccacgttggccaggctggtctcaaactcctgacatcaagtgatcctcctgcctcggcctcccaaagtgctgggattacaggcatgagccactgtgcccagcctattgtggttttttttttaaagaacagagagggcagggtgtgttaggggccatggtagcagctggacagaggtttgtaccaggtggggcaggccagcgggggctggaccagcattgtctctctcacagaatacatccagcctgtgtgcctcccagctgccggccaggccctggtggatggcaagatctgtaccgtgacgggctggggcaacacgcagtactatggtgagtcctgtcctctgcctctgatgccaccgtttgggagactctgaactaggctggggatgggcagtctggctggttggatgagtcttgaccatgaggagtagggacgctgaggggaatggggtgggcaccaggagggaaggggggtgtgtacaccccccagctctggccagccttgcctgcacacccccaggccaacaggccggggtactccaggaggctcgagtccccataatcagcaatgatgtctgcaatggcgctgacttctatggaaaccagatcaagcccaagatgttctgtgctggctaccccgagggtggcattgatgcctgccaggtgagggactctgtaggggcagccccctggtcgctgccaccccagggatggagatgcaggggagtgggtggtcaggctccccatctaaaagcctgagggctctggggccacagcccatgtcatcccggggtgggcctcctgtccaaccactttggccttcagccagacctccctctcccctcccagggcgacagcggtggtccctttgtgtgtgaggacagcatctctcggacgccacgttggcggctgtgtggcattgtgagttggggcactggctgtgccctggcccagaagccaggcgtctacaccaaagtcagtgacttccgggagtggatcttccaggccataaaggtgaaagttgggtccagatgggagccagggtggggacgtttgggtgtctaatgggggaagggaggcagagatttgttttaggaaacctacgctcaggcctagaagagggccccccttgggaacagatggactttgaagggttcctggggaagggaagccagtggtgggacgtggaagcctctcagacctcgggagcccccagctgtctttccccagactcactccgaagccagcggcatggtgacccagctctgaccggtggcttctcgctgcgcagcctccagggcccgaggtgatcccggtggtgggatccacgctgggcctaggatgggacgtttttcttcttgggcccggtccacaggtccaaggacaccctccctccagggtcctctcttccacagtggcgggcccactcagccccgagaccacccaacctcaccctcctgacccccatgtaaatattgttctgctgtctgggactcctgtctaggtgcccctgatgacgggatgctctttaaataataaagatggttttgattaatgtggcctccgagcttacaaatgtacacagcaatgaggacattttgtcaggaaggaagagaagaattaggacctggcgcaaatcagacagagagtgtgggtccctcagttcccactgatttgagatttaagattttaattggttcacttaactggaattttcctggagcaaattggcttcaggtacagctggatccagctgctctctcaaatctgccttaggctgtgttagcttcatttccaagcagcctctcctacaaccagagagagagatgtccccttccacacaaactctttcccaatcactgcagaaaaagtcccaggcaacaacaacaaaaacccaggcccagctcccattgtacagatttgggtcacgtgctcatcccttggcaaatcactgtgcaccggatgtacgcggtaggggtggagcggggtggagtgggaggcgctaggccttcaagaatcgtgtgacctgagtgtgggagtcccaaaggaaatagggtgctatttccagaagtggaaatagatgctcagtgagcaaaaaagacatctaccttgaaccaacacggaaaacggggccctgtaaggtggagatagggagacgctgggaacacagcctgagaccctcccccaacccctttctccatctgggcagcttctggggaggaacccccttctgtagagcctctgcagagcctcatgcagccccgatggccaccagggggcactgctgccccaacattgtgacacattaaggggtttcctgcctggagtcagccgcatgttgctgaaaacctgctgttctgctgaagaaaggctcagcgggggagcctgttcaccatgactttaaataataacaattatcatacatcacccatggaccacagcttccaagcaatttcctttttttttttttttttttttttgagacagagtttcactcttgtctcccaggttggagtgcagtggcgtgatcttagctcactgcaacctccgcctcctgggttcaagcgattctcctgcctcggcctcccgagtagctgggattacaggcgtgccccaccacgcccagctgatttttgtatttttagtagagacgggctgtcaccatgttggccaggctgctctcgaactcctgacctcaggtgatccacctgcctcggcctcccaaagtgctgggtgtcacgcgcatccatgtgaagagaccaccaaacaggctttgtgtgagcaataaagctttctaatcacctgggtgcaggcaggctgagtccgaaaagagagtcagtgaagggagataggggtggggccgttttatgggatttggataggtagtggaaaattacagtcaaaggggtttgttctctggcgggcaggggtgggggtcacaaggtgctcagtgggggagcttctgagccaggagaaggaatttcacaaggtaatgtcatcagttaaggcaggaaccggccattttcacttcttttgtgattcttcagttacttcaggccatctggatgtatacatgcaggcttgggctcagaggcctgacactgggattacagatgtctgctgccacacctggctaatttttgtatttttagtagagacgggtttcaccatgttggcaggctggtctcgaactcctgacctcaggtgatccgcccaccttggcctcccaaagtgctgggattacaagcctaagccactgcacccagcccagcttcctaaaatatagatgatctacaagagctcctttgagaaactgacaaactgtgcatttggaaaacgatcccagcgtcactccccgatccccacacccctggcgaggttgagccccaccactgctttgttggtcaggagcccccaggcccacatcgtgttagcagagcctcagtgcagtttccccaaacgtctacctctggctgtggtgttctacccatggcatgtgggatgtaatttgagacctgacctacggcttgctttgttagaaacgtattgagttacaacacggagtgactgagttttcctttgtaattgccagctgagaaatgtactgtacctgtgttttaggaagtctggggactctgagagaacatggtccaccctgggggttctaaactgaggtgaccatgtcctggagggacacagtttgctctggtgaggagaagggcgggtgtgaggggcactgaagaaggcatggccctgccctgggaagtctgggggggatgtggccttattctaggggatctgatggaaatttggtcattaaaagccaacaggcatcctgctgggaaaataaaaaccaggtggccatgttattggaaaggggtcctgatccagaccccaggggttcttggatctcgtgcaagaaagaattcatggcaagtccacagagtaaagtgaaagcaagttgattaagaaagtaaaggaataaaagaatggctactccatagacagagcagccccgagggttgctggttgcccattgttatggttatttcttgatttagtcttgatttattatttagttatgctaaacaaggggtggattattgacgcctcccctttttagaccatataggataacttcccaacattgccacggcatttgtaaattgtcatagcgctggtgggggtgtagcagtgaggacaatcagaggtcactttcatggccatcttggttttggtgggttttcccgacttctttactgcagtctgttttatcagaaaggtctttatgacctgtatcttgtgccgacctcctctctcatcctctgacttagaatgccttaatttaccgggaatgcgggccagcaggtctccgccttactttacccaggtcctatttaagatggagttgctctggttcaaacgcctctgacagccattctgagttctgtctgcactgttgctttgttggaggagtggaggggctggggagattgtgattcactcaacagccattcactggtttcccttgtatgccaggggtcagtgagcctcagtttctcctcctgctcccagcaaccttgccactcaccccaaagagctaggaagatatttaaaaagaataataacagtcacaaggttgctttcagttcctgccagggtctcagtcttcagaaaagctgaatatgaaaattacttccatgtcattgtggtgccgctcagaatcagaaatatttgacccatcttacagaattagtgcaactacatcaggaacccaagccaagttttgcattcctatttagcatttatatctacatagtccttttcaaatatagaaaagctttctggatgttagttggaacagatagctccatatgtggttataagttggcattctcccagctgggttgaaggagaaatgtacagctactctgccacaacagttatttcatacataaaatcacagccatgattagcaatgatggtgaaggctattcattttatattcagaaataattattgtgaacattcagatagcagcataagtagggagatggactttagtttctgcataaaaagtaacactgtttcaatcctgcagttatgaagcgaggagctgttttggctcttgctgcatgacataccacccaaagctagtgggtacagtaaatgctcatggattctgcagctcagaaagttggacagggaacagcaggcacagcttgtctctgctccctgatgaccaggtccttagctagaaagcctaaaggaacagggactggaatagggaggcttcttttgtttgtttgttttgaaacagggtcccactctgtcgcccaggctggagtgcagtggtgtgatcatggctcactaaaacttctaccacctgggctcaatcgatcctcccaacttagcttcccaagtaactgggactacgggtgtgtgccaccatacccaactaattttattttttttttgtagagatgggactggttgcccaggctggtcttgaactcctgggctcaagtgaccctcctgcctcggtatcccaaaaggaggctctttactcacaagtctagtatccgggctgggatcactcaaaagctgagctcagctggtactgtggactcattgtctggctaacttgggcttccttccaatatggctacccaaggacatttgaacttctcacgtggtggctcatggctccagagtgagcattccagcagacactggcctttacaccccagcctcatttctgctccactctgtcagctgaagcaatcacaaacctgtccagaccctagaggaggagatggagaccccaccctttggtggtggaaggcaggtcaaaaaatttggggccacatcttaaaactgccctaggagcttatggactatcggagcaaattaacagctgacaaagcagagaaatgatccctcagtaaggtgttcaacctgaaatatttccctgctaaaattgtggataataaaattatgacagtaataactttttagaacactttcacatttgttcttacattacagaagttcattctaagaaggtgatagtcagctttgggcaaatctttaatttaatacttcactaattagcatttggccacaatgcctgtttcacttctaaataataataataatttatattaataaacatatccatgcatatttttgagcacttcctatgtgacaggtactgtactgagagttttatacatgttacttcagtatttccccaaattcagatgtttgaaagtggctgtcttaatttttgctattcattcattcaaataatatttattaagcacctattatgtgccagacactgttctaggaattggagaaatataggggacaggacaaaccaactttatggagcttaggggcaaacaaataccgctggtactacttgtattgttttattcaaattatctcttttccttttgtgtgtgtgtgtgtgtgtcttttttttttaagcttagccttgactttatttatgtattatttttattgatttatttattttgagaccgggttatgagactggctaatttttgtatttttgatagtgatggggtctcgctatgctgcccaggctggtctcagactcctgggctcaagcgatccacctgccttggcctcccaaagtgctaggattacaggcatgagccactgtgccctgccagccttgactttaacaataatgtttatgaaactgtgggtttgaggccgggtgcagtggctcatacctgcaatcccagcactttgggaggccgaggcgggtggatcacgaggtcaggagattgagaccatcctggctaacacggtgaaaccccatctctactaaaaatacaaaaaaattagccaggcatggtggcgggtgcctgtagtcccagctactcaggaggctgagacaggagaatggcgtgaagccgggaggtggagcttgcagtgagccgagtttgcgccactgtactccagcctgggcgacagagcgagactctgtctcaaaaaaaaaaaaaaaaaaaaaaagaaactgtgggtttgatgtggcggtggcagatatatgtttttcaatataaatcaaaacaaatgtattaaataaacaaatgctagtgaaataataacaattccttcttcactgccatcctatactctcccggggtttcccgccagcagcccatgtgccgccctttgggaaacacttgtttcatcgccatgcaagctgggaaggagggtctgtggggtttgctgtcctacagaggggctgcatatcccgtccaaggtccacctccgaggggcagggctggcgctggggcctggggctggaacagctcgggatatggcactgagctctcattcccagcctctctctgctgagcaggttcggacactttctccctggcggggtggtgggggggtccctggaccgctagggaagtgcatgtgtccagatgctggcggtgttctggagaaaaagatgggatgccttaacccagacactccttggactggtggtgcaaaaaggagccttcgaatgaggactgggcccaggtgtggcaggccaggtctcactaacgcaggcctccataacaactgtttcagcaccgactgagtggctaagtcaaatattaaaagctgatagagccagtgccctatacaaaagctggaatgtaacaaaagcctaccaagagttttgctcaggcctttcctgggctttaaagcatgacaagataaagaatgaattcttaacaggacccttttaggattaaacaagtttaattgggggtctgaagaaactacacttacacacaggcatatagcttagaaggtatataagctctggaaaactttgtaattttgagttggtctggggacaatttccaggctttcaccctataaccagttacagaaataaaaactcccttttcgctgggtgcggtggctcatgcctgtaatcccagcactttgggaggccgaggtaggcggatcacctgaggtcaggaattcgagacaagcctgaccaacatggagaaaccccgtctctactaataatacaaaaattagccaggcatggtggtgggtgttggtaatcccaactacttgggaggctgaggcaggagaattgcttgaacccgggaggcagaggttgccgtgagccgagacagtgccattgcactccagcctgggcgatagggcgagactccgtctcaaaaaacaaaaacaaaaacaaaaacaaaaacaaaaaaaacctccctgttctcccagtttatctgcatctcatcactgggccatgagaaatagcagcctaatcctcagtttggtccaggaacacaggtgaccctctgtcccatgtggtttgaccaggtaaagggctgtctggggtttgagggtctggagcacccctttgggacactgctttgaagatggagtccccagtgcctaactctgagcctcctccaccagggtggtccgtgaatctcacaggtgcacagtaacgagcccccttgcctgtatgctcctcctccccgtctccccgttcacgtctccaggcgaatctccccttctgggtccagtaacactcctaaatgcctgaccttgactatccaccatggcagccccagccatgccctgcagatgcccacccctgggcccccggggctggccagcagcccacgagtctccccagccacacatcttggccctgcttgatgcacatgcactccgttcctggatgctgtgtgctcatctctaacctgctccaagagaaccagcagggccccatgggaagaggctccctgcatgttcagctgtctgtcagcagcggcccttcaccaagcagtggctcaactttcccactgtggatcgcttgacttgtgcccagccctgctaatgggtggggggttcctccagggtctggcaacccggccccctgggaaagccctggaagatttccatcccctctttcctcccttgccctgcccaccaaccccagacctggcccagcctcaggcagaccggatgggaaccaggatccctgggagacccccaggccccctggaccctcgaacaatggaaggtgagctccagctgccccgtccccaccctggccccacctctgccctggtataagcccgcctggcccgcagcacctgcagccaccatggggatactgtggcttctgctggtgggtgagtaggagtggggactctggaagggggtcgactgtgccacgtgggccccagcccttagctgacatccttcccctcagtcctacagaaccaagtgacttggagcaaggagatcagaggtgagaatggatgtgctccctaacctggagagaggacagggccatgtggacaggcagggagggctccaggggtctgaggagccatggccccaccctggagtccctcaggggacctggagctttctcttggggactgaggggacacagccctgccctggggctctgaggggagcctcagtggtctcgtgtccccagcctcgctcctgtacccctatgggctggagtgtggggatcaggccctccctgcagaggatgatgacttctctgaggagctgcggctgctggagcccttcatgctctttgaagccacacacgggacggcctatgtgagtgccctggccctgaccgtgcggtccctgggctctctctcttctccccaccccactcttgactcggagcctgtctatatctatagctcctggctccttctggcttcgtcctctgtcttcctggggcgggccctgtccctcttctgtcccctgccctgccaacacccccctgcgggtcttgcccttcctcacttcccccagttctgcaccaatgggctggtgtccttcggggagcctgtggctctcttcacactggaggcatttccccaggagatgggccaggccttcgcagtcccgttctgggccaatgggtccacactgagcaggggccagatgtggtaccggcagagccgccagccagagctgccgcagcaggtggcctgagacctggcctcagccttcccccatgccccgcccaccccttgcgccctgctggtggccatgtgggaccaaattccattttacggggcacttggtccccaggtgaggaagcgggtggcagagaagggcccaggctgaggctgtttggcccaaccccttgggaagaagggcttggattcctgggtaaggaggagacaccacggaggagagacggagatgggggaacgagggagagatagagggggcgggaagagagagacagagagacggaagcatggagatgcagcgaggtagagaaaatgggtgagaaagagggaagacacgaacagggagagaaatggcgagagagaggaggcaagacagcaagcgagaggagtgagatgatcagatggagagacagagaataggaaaaggagagagacggagagagagaggggatgagagcagagcagaaaaatcgagactgggggatgtgaaaggaaggctggcacaggtgccagcagaggcagctgtggacatggtgtggacaggggcctgggaggtggcgtggatgggggtctgggatgtggcatgggtaggggcccgggatgtggtgtggatgggggcccaggaggtggcacagctggaagcagccagcttagtggtgcagatggagctcggttgaggactgggcagtgaggagggtcctgggtgcccctggaccagcccacgacaccctggctcctggcgcttgccctgcaggtgaacaccttccaggaggtgctggccctgggcagcggcccctcctgggtgctgtttcaccacaaggacatccagtggaccatgggggtggccagcggtgggagcccccaccacggcctggggggcattgcggcccaggtgagtggggaacccacaggggcctccctgggtccttggggagggtgaggacgcaggtgggctgaccctgttccaaatgacacccccaggcaggcttcaacagcggccgacagagggactacttcacccttcctggctcccggacctcaggcatcctgaatgtggcagacaccagcaatgtgggcatccccaggcactaggccttctgcatcaacagctttgcagtccccaacggctgcacctacaatggtgaagggtggagaacctgccccagacctgcctgctcccagggcccagccacagagcccaggagcccaggccccacactctcctcctccaagacccaggagtccagtcagccctcagtccattccatccttagatccaggaatcagaggccgggcggggtggctcatgcctgtaatcccagcactttgggaagccgaggcaggcggattacctgaggttgagggttcgaggcttgaccaacatggagaaaccccgtctctgttaaaaatacaaaattggccgggcatggtggcacatgcctataatcttagctacttgggagactgaggcaggagaattgcttgaacccaggaggcggaggttgcagtgagccaagatcgcgccattgcactctagcctgggcaacaagagcgaaactctgtctcaaattaaaaaaaaaaaaaaagatccaggagtcagaacccccagtccccaccttcctcaggacctgaggttcaagcctcagccccagacacccccaccgcagcccactctctccacagcccagttcctgcccctaggtgcctctttgtggaacagcagtgcctgcagccaccacactgtgggcaggaaggccgggtgtggtgctggccagagggctgccaggtggggcagcagtgtatgcctgcacaccccttcccacactgctgggcccctcgtggcccctcctgccacctgggtccccagggccacccgcacacactctccagatggcagctgtggctccagccctgccacttcgtcctggccctgcttcctggcatctgcgtggaggtggagttgaggaggggaggcccggtggcagaggccctggtgcggctggtcatccatggctgggatgtggtagtgagatcgcatggcccaatagaacacatcctggtgagtggggctgggagccgggctggaggatagaacccggacagccgtggagtcgcagacacactaagtgcccacagccccagagactgccacagagactggcgggcagagtcaaatgttagatggacaggcaggcagacagacagacaaaatgaataacaggcagagagacggacaagaagacagaccagctggccaatggacaggaagacaggagggttggacaggtggacaggttgatggaaagacagacagagtgacgttgggatgaccagagcaggtggcaagacagacggcagaagggggctagatggacagaaggacacatggcgagcagatggcgaagcacttggtggactcgctgaggccgacgatggtcgcaggcagacagagcctcccgggctctcatcctagccatggacctcacattgcccaccgatgcagccctccggggcctcagcgccacctgtccccttgaccccacctttctctgttatacaacccagtttctgccgcccaccctctggtttcctgactggttgacctcactggccgccccatctgctgagcctactgagcctacggtgcttccccacttcttaccttctgggacatcaggctccctctcaaatccctgcttgtctacactcatacctcctgcgctccttcctccaataccccacaggtgaaccacacctctccacttgcactcacccctgcatgtaggcagcagagcacacctgggctggtgtcgtacctgtgactgtgaacttgaaaggaccttccttccacctccctggcaccctcactcacctcctctccctggccacctgttcacacctactcctctccctttagaccaaacctcctccctggaactcattctcagcctatgagatcgcttcctacttcactggtagcatcagctggaacctgccaggcactccccaaccctccacctacagtccaggctgccatgatggagggtggtctgtgctccttcctggcttggccacctctgtgacagttcctgcatctcccagcaatgcttcctctccctctcctctatatccgtgcttctcaaagtgcagctattagaccagtagcatcagtagcacctaggaatgtgtttgaaatgcaaattcttgggtcccacccaagaccaccactctgggtgggtacatgcaatctgaattttttttttttttttttttttgagacagggtctccgtcactcaggctggaatgcagtggcacgattttggctcagtgcaaccgcctgccttggcttcccaggataatgggattacagggagtgcaggccagcactcctggcttgcagtctgtttttgctagcccttccggggattctgatgcatgctgagctccaatgagcttcaccatcaatttgctatttttttttttctttttgagacagagtctcgctctgctgaagtgcagtggtgcaatcttggttcgctgcaacctccgcctcctgggttcaagcggttctcctgcttcggcctcccaagtagctgggattacaggtgtgtgccaccacgcccggataatttttgtatttttagtagagatggggtttcaccatgttggccaggctggtctcaaactcctgacttcaagtgatctgcccacctcggcctcccaaagtgttgggattacagatgtgagaacctgcgcctggccaatttgcctttttctaccagatccttctcactgcattccaataggctacaattttgccatcttcaaaaacctttctcctcaatccttcctccgcctctagccactacctcatttctcacataccctgtacaagaaaagcacacagaagagttgtcaggctcactgcctccaatgcctctcttctttctttgagagacagggtctcattccatggcccaggatggaatgcagtagtgcagtcatggctcactgcagccttgacctccaaggctcaattgatcctcccacctcagccttctgagtagctgggaccacaggcgcacatcaccacggctggctatcagttcctctcttttcattctctctttcggaccttctctagtcaggctttttccgccttcaacttcatgcagccaaaactactctcgatgaggtccccccaggacagtagtcaatcttcaggccacatcctgattgaccgccagttatgtctgacacagccctgtccctcccttctccatgagacactcttcccaatttccaagaccccacattctcccggttctcctccagccatgcgtccccatcagcccacacgctaaacactggagtgcccagggctcagcctgccctcctctcctccccaccttcacccattcctgggcactcacccaggctttctgatggaaacacaccaatcttctcctacttttcctcttaagaattttacctgaccgggtgcggtggctcatgtctgtaatcccagtgctttgggaggctgaggtgggaggatcgcttgagtctaggagttccagaccagcctgggcaacgtagtgagaacccatttctacaaaaattttaaaatttgccaggtgtggtggcccgtacctgtagtcccagctatgtttcagagcctcatggcatcttctccttcttgctgacaagtgcatttctatctgaatgcctctcgctgggaacctgcgccatcacactcaccccatgccaaggccccgaccccacagcagggccacattctgcacctgggaccgcaggagctgagccccaactgccgtgagctgtgtgagtgcaaggaggctgggcagccaccccactgcagcccccaggcgtgtgaggacggggaggcctgcttcctgctcaccggggcctggtactgtggggtccggagaggtagcagctgggtgtcaggtgacccccattaccacagcttcaacagcacagccctcacagcccagggtgcctgtcactatgtgctgagccgcacctgtcaggccggcctgagggcacaagctttcacagtgtgggtggacaatgagtacctaagtcccacggccctcatgactggggctcggccgatcgaagtggacgtgcacggggtgaaggtgatgatggaggctcagacccccgggagggcacaggtgagcttgggcaggggctgggatcaggccccagaagggcgggcttagactcaggaatccggggaggacccattcacatcctaggaagacttgaggggacacagcctcaccccaaaggttctcagggattcccagacccacctaggggtgtttgatgtggacatggccccgggtgtgtctccaggttaacaggacccaggcccacctgcccctacgcctggctggcggccaagtgcacgtctatttcagcgattctggggccatgctggagactgacgctggcctcttggtctcctacgactggagccaccatgtatccattatggtgcctgagtcctacgctggcaccctctgcagcctgtgtggggacttcaacggggacccccatgatgacttccatgcccctgatggctccctcctgcctgacccggaggtgtttgcactcagcttgaagggcctggattccccagccagttgctccaccgtgggcactgcccctctgtgcccccatgaccgagagggccggtaccagtcactggctttctgtgggctgctgggtgcccacgatgggcccttccaggcctgtgatgagctggcccaggcccaagtccacatggagaactgcatccgtgacctctgtgccacaaggggttcccggcagatcctgtgcgaggctctggggagctatgtccagcagtgccagcagcacggcctcctagtgaggccctggagacacctggtggactgcggtgagtggcatcctctccatgccagccagcacgttctgccggccaggtccagaaaaccagttccgcccattttgtggggttgcataattaatgatctcagagtagctacttcaggcctggcccagtgaggcgctcgacatcactggccttggtttcatgcttcccaccaaattggctccacatccagacaggctcaccctgaccacagtggctccacaccttgcagccactcaggtttctcagcccagcaggaaagagagctccgtgggtctcagaagctccagcatgatttgcactgcgtctctgtggcttcaactgactccttcttgtacctctcactgtggccaggggaatgtgagtctccgattgacttctgcctgaccgcgggctctgcccttggggagactgcccaggcagaagttgggatgaggttagcagtgggcagtagtactggctggtgcccaaaggacaaatgtctgcggcctctcacccttgtcctgctgccaagtgatctttgtcaagagcattaagcagtctttcaaacatttttgttggagacccacaatacaaaatatagttcatttcaggatctaattctattagttttctatctcttgctgctgtaacaaattgcaacaaactcagcagcttaaaataacactttttttttttttttttgagacaggatctcgctctgtcacccaggctgcagtgcagtggtgcaatcatggctcactgcagcctccaactcctggctcaagtgctctttctgcctcagcctcctgagtagctgggactacaagcatgcaccaccacacctggctatttttaaaactttttttgtagagacagagtcttgctatgttgcccaggcagttctcaaactcttagtgtcaagcgatcctcctgctcagcctcccaaggtgctgggactacaggtgtgagccactgcacccagctaatttttatttatttatttatttattttgagatggagtctcactctgttgcccaggctggagtgcaatggcgcgacctcagctcactgcaacctccaccccctgggttcaagcaattctcctgcctcagcctcccaagtagctgagactacaggcacctgccaccacagctggctaattttttgtattttcagtagagatggggtttcaccatgttagccagatggtcttgatctcctgacctcatgacctgcccaccttggcctcccaaagtgctaggattacaggcatgagccacccctcccggcccaactccagctaattttttgaaaatgttttgtacagatggggtcttgctatgtcaaattttttcttacaattccaacacagttctcgctggcctaaaaatcaacgtgtctgcaggagtgcatttctttctggaggctctaggggagaactgtttccttaattatttaaattgttggctgaattcagtttctgatggctataggactgagggccctgtctctctgctggctgtaacctgagggttggtgtctacttctagaggccacccacattccttggctcatggccccttccatcattttcaaggccactaacagcaggtcaagtccccattatgcttcgaaatcccctgcctctttctgatggactctctggcctctgtctcccacttttaagagcccacgtgattacactgagcccagccagataatccaggttaatctctcccttcccaaggtctagaaccttaatcacatctgcaaagtccattttgccatgtaacgtatcacaggatacagcgattagactgtggacatctttgaggggctgttcttcagctgaccacaccaatatatgcatacacagcacacaaagtgtcaccaaataggaaaatgcactcaatactttgcattacattcttttctattctatttcatttttcaaagcagggaattatcccactgatctgtatagcattgagattgagaacacagatcccaaagtcagcctgccttggttaggatgccagtaccaccactttcagctgtgtgctcttggggacgtcacttaacctctccgtgcctcagtttcccctttaacaagagaaagaatggtgaaaataacacttctcttgtggggttgttgtgagagccaaacaaataaacagtagctggcaatatagtgaatatagtgaatgctctacaagtattagctgtcactatgaaattgattttttttttgaggggggatggagcctcactctgtcacccagactggagcacagtggtgtaatctcggctcactgcaaaattcacctcccgagttcaagcaattctcatgccttagactcccaagtgtctgggagtacaggagcatgccaccatgcccagctaatttctgtattttcaatagagatgggattttgccatgttggccaggctggtcttgaactcctgacttcaagtgatccacctgcctctgcctcccaaagtgctggtgagccaccgtgcccagcctgaaattgacttttaacctgtgttaacatcactctgtcctgagatcaaaaccacagggctctgctgttggcaggtcttgtcccagagtctgggtcagcctgtcctggggagggcctgggatcagcccggcccacaccctctccagtccagcaggcagctgagatgggtcctgagccatctttttatccctttggtgtgaatgggacaacgcgaccatttcacagatgaagagcagacacagagccgcacagctggggagtggcagggaggggtccccctgggcctgatcttgccctgggtgatgcaggggccagggcaggactgagaagtgccgggtctctgacctcgtagggcccacacgctgccagggtggccgagtctgtggtggggcagccacggcagagtgatcagggctcacatgagggaagcgtagggccacaggggagcacagaggaggggctggcccagcctggaaagtcaggccaagtttcccagaggaagggccacgagagctgaggcttgaatgacaagtcaaagccaataggtaagcaaggagaagccaaatgttctagggagaaggaacaaggttttcagaagcccagagactgtgtaaatttgagccagagatgggggagcctggagagagacatggtcctgggctgtgtctgtggggccttgaatggcaggcaagaagtgaggactttatcccgaaggactgggcctctaacctccaggaccccaaggcgcaactccttttctctgcccctagtccctcactcctctcagagcaggaagcaagttcagcatcttgcaaacaaaacctctctttgtccaaaggaaacagcccattgcaagctccgaaggccaacacaagggactggtggtgggtgctctggcctctggcctgcctggcccacccctcctcccaaagccagagacaagccccgggggcatcacacactttgactaaggttaactgaacacccactaagtgctaggcagcattctaggcgctgcagacacagcagtgacccaaacagacaaaaccttgccctcatggaggcgacattccagtggagaagacaatcagtcaacccagccagtaagtaggtgattaaacagtaagtcaggcggggcagggctggggagtgctggagaaggggcatgcagtattaaactggggggttagggttccctggggtgcagagaggtgccctgggagtggagactgaaggtggtggaaaagggagccgagctggctgggggagcggggaggcggggggacattccaggcagcaggaatccaggaaacccatccaggaagggtgcaggtgtctcctccagcccccagactctgggtgctcaaattaagatgaactttgagctggaatatctcccacatcccacccaggacatttctccttttctgactttctttattaatcctgagactgggggacacccccactccgccagcgcacacacacacacacacacacacacacacacaaaaccctccccagcaatctctcctccagtatgtttttcccctgatctgtgaaacccccaaagacaagggttagggatggggtctctcttggtcaccagtgtgtcaccagaacctaccataaggcatttaaaagcataggttagggctgggcacagtggctcacacctgtaattccagtactttgggaggccgaggtgggtggatcacttgaggtcaggagttcaagaccagcctgaccaacatggtgaaaccttgtctctactgaaaatacaaaaaaaaaaaaaaaaaattagctgggtgtggtggtgtgcactggctgaggcgggaggatcgcttgaacccaggtggaggtggaggctgcagtcagccaagatggtgccactgcacttcagcctgggtgacagagcaagactctgtctcaaaaacataaaaaaaatgaaaaagcataggtcagatctcatcagattcctgattaaaagcatccctgggtcccccttacctctgggatgaaaactgacctccaagcctcctcctaagaggcccccacagcggcctctctctgctcaccctgcctcctcctacactggctttgtctagctcactccacaccgagggtccagccacactggcctctctgctgtccctggaccacgccaaatgccttcccacccctgggtctttgcatctgctgttcccccggcctggaatgctctttcccagacgtacacacggctggctccttccatcattcaggcctcagctccaatgtcacctctgcagagaggcctccctagccactgtcctcaaatcagcccatggggctcagccactctgcgctacctaaagctgggtaacacagatctaacccagtttctcaatccaaaattatcttttatttattgctagtttgtcgcccatttcccccctctagaataggccagcacacttttatgataaaaggccagataataaatattttaggctttcagggccacactctgccacaactactcaaagcttctgttgtaacataagaacagtcatagacaatacacgaaccggcgagctggctttcatgaagacattatttatagacaccggaatttgaattttacatgattttcacacctcacaaaatttcctcttttggtttctttttttctaaccacttaaacatgtaaagactatttagattgtaggctgtgccaaaacaggtggagggccagatttgggcccaagggtgaagcttgtcaacgtctgccctagaacatctgttttatgaggtcagggatctctgtcttggtcattgctgtgtccccaggccctgggatgttcccggcatgtagtggatgccaaagttgaacaaatatgtgctatagaaaaggcttcgacacattcattaattcttccaacaaatatccattgaggtttgccgtgagctgggctctggggagatagcagggaacataatttgaacgtggggcagtgagttgacatccttgcattgaatgacttgtgttcctccagagctgacctggccccccgacagccactacgagctgtgtggcttctcctgtcccagctcctgcaccgagcctgccctgcccgacagctgtctgacaccatgccaggatggctgccagtgtgacccaggatttgtgctcagtggcacggactgcttgacccccatccagtgcagctgctccatggggggcagataccacctggccggggagccattctgggctagggagcactgtgagcaattctgccactgcgaggcttccacccatgctgtgtgctgctccccctcctcctgtgggccagggcagagatgtgggaccctaaggggcatctttgggtgccacccattctcccctggcacctgccaagcagccgggcactcacacatcatcacctttgatgggaaaactgttgagttctcaggtacctgtgtgtccgtctttgccgaatcctgtggctcttccggctcactgccattcttcaggatacagctgtgaaaggagaacagatccagcagccccctcatgctcatcttggaggtgtctgtccaggttaatgggacccaggtccacctgcggagggacagcccaggcatggctcagataagcaccagctttgggacgtgtcgtttctaggaaccccaacccttcacccaaacccataggcccaagggaaaaacttattctgtctccattatttctacattttacctctattttctgattatatgcccatttttgactatatccatcagatgcattcagctaatataacagaaacactctcagaccagcttaagaaaaaaaagaattactgatttacacaattgaaaaaaaaaatctacaggtgtatggattcaggcatagctggacccaggtgcttgaacaatatgtctcaaatctgtctcaatttctgggctctcctttccttcattttcagacaggcaccatcccatcccaccttgtagggacaaggacagctgccaggttagcaaatgtcactggaggaaaagtgtccctcactggcccagcttgagtcatgtgaccacccctgaatccctgatggactagctgattggctgggcctgggtcatgtgctggaagttaggataggattgactttctgtgaaccacatggattgattttggaggggtgagttctcagggaaatccagagaaaggagaaatgaatgcagaacaggataaaacaagagatggtcactattatagttatgtccttgttccttcatctaaaaatgttttacatgtattggtacggtggcttacatctgtaatcctaacactttgggaggccaaggcaggtggatcccttgagcccaggagttcaagaccagcctgtctcaagcaggcaatatagcgagaccccgtatctaaaaaagaattaggtgggtgtgttggcgcacgcttatagtcccagcttatagtcccagctacttaagaggctgaggtgggaagatcgcatgaacacaggagttcatggctgcagtgtgccatgattgtgccactgcatccagcctgagggtcagagtgagaccctatatcaaaaaaaatcaacatttttcacgtatttgaacacctactatgtgccaagcaacactgacccaactgtggtcctatgctcccgagccttcctttgattctgcctgctccttaggtgaatggtgagacaacagccctccccgtaagcctgaatgggggcagccttgccgtccactggaatggcctcttctccctgctgcagtcagactttggcctctggctcagcacagatctcacctacagccttaccctcaccctgccccacctctacaagggtcacacctgtgggctctgaggcaacttcaactgcaaccccagtgaggacgctaaggctgacattaccttggagaagcagagcaaggcttgtagggacagctgtggggctgcctgtccagtctcagtctgcaatgaccaggggcagattgtgtcagccaggaggcagtgctggctcctgcaggacccccaggacccttcagccactgccactgggagatcaacccagacccatatgtttccagctgtgtcgatgatttgtgtcttgctggggatgatgaccacatcctctgcctggccctgcagacatatgccgccatctgccagggcgccaacatcaccatcaggcactagaggaattcttccttctgtggtgagtcatggttgagcagggcaggaattcatctgcatgctctgtatggccacacacagactgacatccttctgtactcctgggctgcctgagtgccccaaccacttcccatattcccaattccagcacaggaaggccttccaggttctcctcctaggctccagctggacgcatgtggattggtagggggcctgtatgctaccgactgttatgtttttttttgttttttgttttttttgagacagagtctcactctgtcacccacgctggagtgcagtgacttgttcttagctcactgcaacctcctcctctcgggttcaaactattcttctgcctcagcctcccaagtagctgggattacaggtgcccgccatcacgcccagatgattttttgtatttttagtagagatggggtttcaccatgttggccaggctggtctcgaactcctgacctcaggtgatccgcccacctcggcctcccaaagtgctgggattacaggtatgagccatggcacccagcccgctatgtattttgaataccaccctgggttgactggatccctggccccctgtcaaggggatgtccttttccaccctcagaatgcctgacctgagatgccacaataataatcccaacaactgctaatacttattgaacatctacaatgtcccaggcatggggccgaaggctctgtgtacctcttgccgccactgtctcagaaacaccctgcaagtgagaggcaatgactgttattattcccactttacatttgggaaaacagaggctcacagaggtaaagccatttgtctactgctaatcacaacagacagagttgagacttgaactaagactttctttctccagagacaaaagaagttttattactagccatatcatctaattctttctttcttatttaactattatggaaaatttgaacataaaagtagagagaatagcctattgaatgcccctgtacccagaaggcagcctcaacaacagccaagttgtggccgacctgtgtccacctccacccctcccttattgatttattttgtgtaaagcaaatcccagacaacgtgtaaacctgtaaatactccagcattattttttttaatagataaggacttttaaaaagaaaaaaacctgctgtggccgggcgcgtggctcacgctcacacctgtaatcccagcactttgggaggtcgaggcaggcggatcacctgaggtagggagtttgagaccagcctgaccaacatggagaaaccccgtctctactaaaaatacaaaattagccggcgtggtgctgcatgcctgtaatcccagctactcgggaggctgaggcaggaggatcacttgaacctgggaggcggaagttgcggtgagctaagattgcgccattgcactccagcctgggcaacaagagcgaaactccgtctcaaaaaacaaagacaaaacaaacaaacaaaaaaacctgctgtgatttgctcacacctaacaaaataagcagtaattcccagatatcatgaaaagcctagtccatgttcagatttttctgatcgttcctaaaacatccggctttcctcccttgcaccaaagctttgctggcccctaatgcttgcccattaagggttcctagctggttccaacattaggggcgcaatcggggcaggtcatgttctacggggtgggggtggaaggtgccgctttcttgctcaaccaacaggcaacaaaagcctgtccgataccatcctggggatcaagacacccctaaaaccaggttctaacccacctatgttagatccaaatgtgaatctctgacacctgggccgtagggaaccctcaaagggtttggaatagggaaggcggggagcggggtggagtgggggggaggtaagacagtgttcatggagtgagaaaggtgggccacctaggggctatttctggaataacaataggtcgcatttatccaaggttcccagggtgccaggcgctgtcccaaccacttaatttattttaacttgcttaaccctcaaagtcagtttgaggtcagtactcttttcggagagatgggtacggagtcctggagaggttaagcaccacgacagagccgagattttaagcactcggtcagggagttgggcaaatgtggcctgcagatcatgtttccttacccgcgctttttctcctccctgcatagccgccacgtgtcctaagcacagcagctaccagcaacgcttggacccgcgccgggtgcagctctgcgtccccgcggccgccctgcctgctccgagggctgcgccaacgataacgcgcacctgtgggcaggggccaggtgccggcacccgaaggagtgcggctcggcgcacggcggcccctcctaccaggtgagctgggggcagggtcttgctgttgtgagggggtcggcccatcatggcggtcagggagcccccaaaacatgccagggatgggcgcccaatccgggacacctatattcaattgtgcggatggcacattgtgggttcacaatgtgttgacctgctttattattgatgattccaatactgctactagttactaaggtcattccctgtgtgctaagtgcttaataatattattattggctgggtgcggtggctcacgcctgtaatctgagcgctttgggaggccgaggccggcggatcacctgaggtcaggagtgtgagaccagcctggccaacacggcgaaaccccattctactaaaaacacaaaaattagctggatgttgtggtccacgcctataatctcagctacttgggaggttgaggcaggagaatcgcttgagcccggaaggaggaagctgcagtgagccgagaaggcgccactgtactccagcctgggcaacagagcgagactctgtctcaaaaaatatatgtattattattattactgtcagcactattgactttttaaaatattagccatcacttattgagtgcatagcccccactacacactttggcaatgtaatagtagtaataataacaataatcaaaacagctcattttatttatcattaataggtacaagactctgtcctaaatgttttagcattgtggtcagtgctattttttgtttatttttatttttttatttttattttatttatttatttatttttttgacacagggtcttgctctgttgctggggctagagtgcacgggcgccatcttagctcactgcagcttcaaattccctggctcaaatgatactccccctcagtcacctgagtagctgggacttcagttgcgtgccaccatgtctggctaatttttaaattttttgtagagatgaggtctgaccgtatcgcccaggctggtctcaaactcctggactcaagggatccttctgcctcagcctcgcaaagtactaggattacaggcatcagccaccacacccaaaccatttgtattattttgatggccaacatttgagtagtgatcacacatcaggtcccatactgctaataataataattaaaatgtggccaggcgcggcggctcatgcctataatcccagaactttgggaggctgaggcgagtggatcacctgaggtcaggagttctagaccagcctagccaacatggtaaaacccagtctctactaaaaatacaaaaattagctgggcgtggtggtgtagcaggacgagctgcagacaaaacccctcagacactgagttaaggaaggaagggctttatttggccaggagcatcggcaagactcacgtctcaaaaaaccgagctccccgagtgagcaattcctgtcccttttaagggctcgcaactctaagagggtccacgtgagagggtcgtgatctattgaacaagcagggggtatgtgactgggggctgcatgcaccagtaagaacagaacagaacaggacagggattttcacagtgcttttctatacaatgtctgtaatctatagataacataactggtttggtcaggggtggatctttaactaccaggcccagggtgtggcgccgggctgtctgcctgtggatttcatttctgtcttttggcttttacttctttctttggaggcagaaattgggcataagacaatatgaggggtggtctcctcccttagtggcaggcacctataatcccagctactcgggggctgagacaggataatcacctgaacccgggaggcagaggttgcagtgagccgagattgtaccatcgcactccagcctgggggacaagagtgagacttcgtctcaaaaaaaaaaattttaaatgtattgggggctgggcacagtggctcacacctgtaatcccaacactgtgggaggccaaggtgggcggatcacttgaggtcaggagttggagactagcctagccaacatgtcaaaaccctgtctctactgaaaaatacaaaaataagccgggcatggtggcacatgcctgtagtcccagctacttgggaggctgaggcacaagaattgcttgaacccaggaggcagaggttgcagtgagctgagataacaccactgcactccagcctgggtgacagagcaagactccatctcaaaaaaataattaaatgaataagctaaaatatattgggtatttactttgtgttcatgcctgggctaagcattttatgaatagtaataataataataatggctaatatattaagagtttgggcatttacaatgtgccttgtgtaagcatattaaaataatggtgatattaacaataataatggctggtatgtaccaggcatctgctgtattgctgtgctaaccagttaatgatatataatgataaccatcgtgaacatattttggtcatttgctgcgtgtgtaatcctgtcatcgggataaaaggtaatattttctgagtgcttattatgccttgagcactgggccagcatgttattaataatggtatcagatatatgtcaagaacttggttactgtaggccagctgggtggtgagagcctcatgcgtatgaccgcactgaccttcaaacagccctttgattgcctccaatgtgcagagggggaaactgaggctacaggatgcacagagatctcaagggacagagctaggtctggactccaggtctctctgaccccaaaattgtgctgctaatcactaggctgtgctttccactgagagaaagcaggtgtcacaagtttgctgccctctgggtaaggcagtagcctgtcatgatggtcagacccccagctgttgaatctgggcatggcattcctgcccatcccatgctgagccggcccctgagcctctgctcttctgggtcagctgccaggccagcctcgggcctccaccaggccctgtttgggtccacctgggctgggctgggcagggcatgctgatctggcctccgacctggtctggctgaaccgatgcacccgccgctgcagctgtgacagaacggggcatttccgctgcagcccggcgtgctgccccactgggaagatctgtggtctgcagggtggccagctgggctgccagagccccctgggcacctgcatggccactggagatcctcattacttcaccttcgatggggccatagcccacttccagggcacctgcacctaccacctggcctatgccatccatccattcatccatctatcatccatccactcatccatccttccatccattcatccattcatccatccatccatccatccatccatccatccatccatccatctatccactcatccatccttccatccatccactcacaaaatttttctgagtatctactttgtagcaggccctgctgtaggctctggagacacagcaaagaacaaaagagacaggtctcttctctcctagagtgcacattataatagtgagagacaaacagtaaaaaataaatacataatatttcagatggtgataagtcctagaaaaataaaactagaaaggagaatcaggagtgcttgtgagtatggggtgggagttataatttttaaacagggtgagcaggaaaagcctcattgaggaggtgactttggagcagagacttgctggagggaaggagaagccttatgagcaatgagggaagagccctccaggcacagggaaccttaggtgcaaagtccagacgcagaaatgcccttagccttattaagaaagaacagggtaattccagcagtttaggaggccaaagtggatcacttgaggaagttcaaggccagcctgggcaacataggtgagacccccatcgctactaaaaattaaaaattaaaaaattagccgggcatggtggcacgtgcctgtagtcccacctacttgggaggttgacttgggaggatcacttgagcccaggagttggaggctgcagtgagccatggtagtaccactgcacttcagcctggaggacagagtgaggctctgtctctaaaataaaataaaataaaattttaaaaaagaaagaaagaggctgggcacagtggctcatgcctgtaatccaaacactttgggaggctgaggcgggcagatcacgaggtcaagagattgaatcctggtcaacatggtgaaaccctgtctctactaaaaatacaaaaattagatgggggtggtggcacatgcctgtagtcccagctactcgggaggctgagacaggaaaatcgcttgaacccaggaggtggaggctgcagtgagctgagatcgcaccactgcactccagcctgggtgatggagcaagacaaggaaggaaggaagggagggagggagggagggaaagatgaaagaaagaagaaagaaagaaagaaagaaagaaagaaagaaagaaagaaagaaagaaagaaagaaagagaaagaaagaaagaaagggagagagagaggaaggaaggaaggagaaagaaagaagaaaggaaaggaaaggaagaaggaagtaaggaaaagaaaagaaaaggaaaagaaagaaaagagaaagaaagaaagaaagaaaagaaagaaagaaagaaaagaaagaaagagagaaagaaagggagagagaggaaggaaggaaggagaaagaaagaagaaaggaaaggaaaagaaaggaagaaggaagaaggaaggaaggaaaagaaaaggaaaagaaagaaagagaaagaaagaaagaaagaaagagagagagaacagggaggccagcggccagtgtggctggagtggagtaaacccggggagagtaaggggtgaggtcggagcgttaatggggacagatcctgtagggccttgtgggtcactgtaaggactttggctttcactcagaatgggttgggagttccagggatttcagggagggctctgagcccaggaggcccctgatctgactcaggtgtcagcagatccctctggcttcatgcagtggacagatggccgaggacctggggggagcaggtagactggagaggaggctgacagaattgttcaggcagaacgtggcagtggttggaatcaggaagagggcagtagagggagtgagacatggttagattctggaaatattttgaaaggatcagctgtgggatgagagagagggcaggttccaacatgatttggtttttggcctccgcgtcctggacaagctgccactgcctgagatggagaaggtaggagaggaagcttggggtaagattaggagttcagatttgaacgtggggagttcgaggtgcctcttttctcccagagctgggacacagcaggatgcagacacctggagttctaggactggtgagggcatttgggaattgtcagaatacagctggggtttaaagccaggcaagtggatgagaaaagtaagggaagggaaacgaaggggaaggggctaaggtgaacttggcagtgtgaggtgtgaggtccttggtggcatggagcagacagctcggcttggagattcatacaccttacctgctgtggggtcatgaggagtgtatggatggcactagggggtgggagatggtagggggaaatggatcctgagctcttcccctgcactgcaggtggacagccaggcggtaagcagggcctggtgctcctgcaggtgggcacctggctccaggtacagttcaatggccacaatatgctgttggtgtgcgtggggcctgagttctggagccacctctgcggactctgtggcaacttcagtggcgaccccagtgatgacaaggtgctccccagcagggtgcccaccctcagtgatgccatctttggcaacgcctggtggacccaggacagccggcctgggtgggtggctgcctgggaccaggaagggcccgggttgggagaaatacagggctcagggaaaacagtgggcagacaggcaggctttgagaacagaaaggtggaagaagagggtgtgaattgcacacacaactctcaggagattgattcaggtagaatcaggaacaatgattataccctttcacggatggggaagactgaggcatggaagggcgaagcatctgcccaagttcccacaataagaaatgatggaacgggccgggcatggtggttcttgtctgtcatcccagcattttgggaggccaaggcaggaggatcacttgagctaaggagtttgagaccagtctgggcaacatagcaagatctcgtctttattaaaaaaaaaaaaaaaaaaattagccaggcctggtggtggtgcacacctgtattctcagctacttggaggctgcggcaggagaatctcttgagtccaggagttcgaggttgccatgagccatgctggcaccactgcactgcatcctgggtgacagagcgagaccctatcaaaaaagaggggaaaaaaatggtggaacagggatttgagtccaggcattctggcttcagggtccctgatcctaaatactccacccccccacctctcacaggggaaacaggaagcactcctcacagagaccttatttatttatttatttatttatttatttttgattcctgctccgtcgcccaggctggagtgcggtggcacgatctcggctcactgcaacctccgcttcccaggttcaagtgattctcatgccttagcctctcgagtagccgagattacaggcacacgccaccatgctcggctaatatttatatttttagtaaagatgaggtttcaccatgttggccaggctggtcttgaactcctgacctcaagtggtctgcccacctcggcctcccaaagtgttggaattacagccatgagtcaccgtgccagtctcccttcactgagaccttagtcctgcaaagtccaatgcaccaaacacacgtgctatttaaatttatgtgtaaattaaattaaacatcttctgtcacactacctatatttcaaatactcggtagcctctggttgctagtgcctgcggtattggatggcacagacttggggattcgtccaagtagcagagctgggatctgaagctaacaaagttggttccagaatccaggatctaactaataactatcctggctgggcgtggtggctcacacctgtaatcccagcactttgggaggccaaggtgagcagatcacctgaggtcaggagttcaagaccagcctggccaacatggcaaaaccccgtctctactaaaaatgcaaagattagccggctgtggtcgtgggtacctgtagtcccagctacttgagaggctgaggcaggagaatcgcttgaacccgggaggcagaggttgccaagagctgcgatcgcgccactgcactccagtcagggtgacagagcgagactctgtctcgaaaaaaaaaaaaaaattaatgactccctcatgttgagtaactgtatgaaaatcatttgttactatggggttgaggtttttaaacgtgtctaaaactgcaccaggagctgtcagctgctgggagggagaacctggtgcgggcagaggaggactagccaagggtggccaggggggaggcaggaggaggaggaggcttggaggtggtggtgttgagtcctgtgatcccccagctgccggcgggaccctggtggcgctgagccctgccaggacaggccccgggtggagcagctctgcagtgttctggcaaaccgctccgggcccttggccaagtgccactggtatgagagccccgtgtcctacacgcaggtgtgtgtctctgacctctgccagtatggcacgggcaaccgcatgctgtgcaccatgctggaggcctacgtccaactctgcgccctgcgctgcgcgttgcctgcccgcgtggcgagccagcctgggatgcagttacgtgctccttccctttcaccgcccccagctccaacgatggcctccccacttggctagctaggatgcctccttcgccggtggatcggaagccctcatccccagggagaccccagccctgcctaggatgttaacccaagcttcaagccagaccagggctcctcttgggcccttcctaatcctacctctcacctcccagcactggaccctatattgtccgagttgctcactgtgtgctgcaagtttgaagtggcctgtgggtgtgacatgcataacaaaccacgtggttaaaagtttcatcggaacaatcgggaggctgcagtgagctgagatcatgccattgcacttggcctgggcaacagagcaagaccctgtctggaaaaaaaaaaaaaagaacagtggcagtttgggaatcgtcctgtggttcattcctgcccttccctcccctgcactcaccctgatttttttctccctctaattgagggagcaaaggtttcagggttgtggcctctgggcgatctttcccctcccccaggtgtggcgtgtccagccaacagctactatgactcctgtgggccacccttcccggccacctgtgctagcctcaactcctccgcgccctgcaccctccagtgcacagtgagctgcttctgcctcgagggctttgccctggaggcgggcatcttcggtgccccacgcttgctgcggctgccacctgcagggccgctatatccgcctgggtactgaggtgctgcctgcagccccctgtgatcagaggtgcgtgtaccatggacctggacgcccgctcgagtgccaccctcatgcctgcaggccctgtgagctgtgctgccagcacaggggtgtctggggttgctaccccatgcactacgggacactgtggctgtacggagacccccacctgcacactttcaatgggacccaccatcaggttcaagggcctggctgggagatattggctagaacatgccggccacaccacagcgcctatgccatctgggtggagatcaggcgccaggagccgtgggatgccatgtgggcccagcaggtggatgtggatgtggcaggatggcagctgtcactgctggcaggacagtttggagccgtccaggtacttgtcacccagctctggtcctgggcctccaggaactctagtgagtaatgagcgtgaagaacagcaacgccgggcgtgggagctcacgcctgtgatcccagcactttgggaggctgaggcaggaggatcgcttgaggccatgggttcaagactagcctggccaacatggcgaaaccctgtctctataaaaaatttaaaaatttagccacaagtggtggcacgtgcctatagtcccagctactcaggaggctgaggtgggaggatcatttgagcccaggaagtcgaggctgcagtgagctgagatcacgccactgcactctagcctgggcaacagagaccccatctcaaagaaaaacaaaaacaaaaacaaacacaaacaggctgaagaaatggtggtggcccaagggccttccctttggagaaagagctactgggacctttagaagtgggcagagggccccagccctgagcttcagaggatccacccgctttggcctcttctggctgcgtcccactccgtgggctttggagtcctctgggaaacgcccctgacccctagagcctggagcctgcatggccctccccttccagaccgtgctccaggaatgggaattccctgcctaaaaggctcagagctgcttccagggtccacgctggccttgtccccaggtccatcctcacaagagtggaccatgcggcccacatgacgcattctaggcagcattgcaggaagccagtgtggacccagctgggcagagcggcccaggctagatgtacggggatgcagtgcctcttgcagtgagggccagagctggggctgcacagagaagagacgggcccagggcagtctctccttggatgccagatcctgtccaggaaaagttggaaattctgattttgcacctgaccaccaggacgctagggaggtttatgcatcaaggcaggaggatagaccgtattccatgtaatagtgtggcagcttggtttgtaatcttaaacatgaagatgtgtaaggtgtgtgcctccatttctactcttgtctgggcccctcagggttgatgggtgttgggtccacctggggttcggtggatgctttagctggcaacgtggtaacacggtgaagcctgtggtgatgggcccaggggaccaggactgagtcccactgtgccatttgctagctgtggaactggacctagtggctttacatctctgtgcctcagtttcccatctgtaaaagggaagtgaatggtacctacctgtatgtgaggattaagaggtgtgaattgtctaggagaaggcatttagtaagggcataaaagcatttgatcaataaataacacaggtgaggtgtgatggctcatgcctttaatcccagcacattgggaggctgaggcaggaggatcacttgagcctaggcaacatagcaagaccctatctctatttaaaatttacatttaaaattaaaaaataatagtaaataaataaaacatgtaactgcaaagtcaagccaacgttgtaccactagtgctgcatccccacccccagcaggcagagtaaagttgtagtctttaaaaatctgaggccgggcacggtggctcacgcctgtaatcccagcactttgggaggccgaggccggcagatcacctgaggccaggagttcgagaccagcctgaccaatataatgaaacccgtctctactaaaaatacaaaaattagccaggagaggtggcatgcgcctataatcccagctactcgggaggctgagacaggagaattgcttgaacccaggaggcagagtttgcagtgagctgagatcgcagcaccattgcactccagcctgggcaataagagcgaaactctgtctcaaaaaaaaaaaaaaaaacaaacaaaactgaactcaggagccaggtgtggtggttcgtgcctgtaatcccagcactttaggaggccgaggcagacagattgcttgagcccaggagtttgagactagactgggcaacatagtgagaccccactctacaaaaataaaaaaaattaggccgggcgtggtgactaacacctgtaatcccaggactttgggaagccaaggtgggtggatcacctgaggtcaggagttggagaccagcctggccaacatggcgcaaccccgtctctactaaaaatacaaaaaattacctgggcgtggtggcaggcgcctgtaatcccagctacttgggaggctgaggcaggagaattgcttgaacctgggaggcggaggttgcagtgagccgagattgtgccactgcactccagcctgggcaacagagcaagactccgtctcaaaaaaaaaaaaaataaaaaaaaataaaaaaataaaaaattagctggacatggtggcgcatgcctgtagtcccagctactcaggaggctgaggctgaggtgggaggatcagctgagtccaggaggcagaggctgcaccatgcacttcagcctgggctacagagtgagatcttgtctcaaaaaaaaaaaaagaaaagaaaagaacaagaaacgaactcaggtcacattccttctgtctcaacgccctcccatggctccacctcactgagtgaaactgtggcctatgtgaccctacaaaactggtttctgtcacctctctgcccttgtcccctcccacctgcccctcactcactctgctccagccgcagtgacctcctagtgtcctcccatactccaggcaggctcccacctcagggcctttgcacaggctgttccctctgcctgaaacactcttcctggaggtcctcatataactgatcattctcatctttcaagtctcagcacaaatgttaccctctctgagaagccctccttgaccacacacatgaaaagaaccaccactcccaccctctctctactgtaaccctactccttttctttttttttttttgagacagagtcttctgccgcccaggctggagtgcagtggcgggatctcggctcactgcaggctctgccccccggggttcacaccattctccttcctcagcctcccgcgtagctgggactacaggcacccgccacctcgcctggctaattttttgtatttttagtagagatggggtttcaccgtgttggccaggctggtctcgatctcctgacctcgtgatccgcccgcctcggcctcccaaagtgctgggattacaggcgtgagccaccgcgcccagccctttcttttgaagtatctgtcagtctcttaaatcatcttttctgtcaatcatttctttgtttatgatctatcttccttttgacagaatatgtgttcttcgaaggcaggaacttaattttgttgaaaaatagacaaaaatccctgggagaaagacaataaacaaatacagaagtaaatttatggtatgtcagaaggtgacagctggttctggagaacaaaaaagcaggaaaggggtgaggggccagtaagggtgttgccctttaagacagggtaacaggccaggcacggtggctcatggctataatcccagaacttgggaaaccaaggcaggaggatcgcttgagcccaggagttcaagaccagcctgggcaacatagggagaccccgtctctacaaaaaatcatgtaaattagccgggcgtggtgatgtgtgcctgtaatcccagcacgttgggaggctgaggcaggaggatagcttgagcccaggagttcaagaccagcctgggcaacatagtgagaccccatctctacaaaaaatcaagtacattatccaggtgtgatggtgcgtctgtagtcccaacaagtcgagagactgaggcgagagaatcacttgagcccatgatgttgaagctgcagtgagccgagatcatgccattgcactgtagcttgagtgacagagcgagaccctgtctccaaaaaaaacaaaaagggaagcagtgaagtgtggagcagagatcggaaggagagaccgggagccatgtagatacaaggggagagtgtccaggcagaggagcagaggctggaagggtgcctggtgtgttggaggagtggtggggagacccggggagctggcgcagagtgggcagatgagtgaaggggtgtgtgagacaagatgaggacagaggggacagaggtttattttgtgggactgcccaggccacggtggcgagtttggattttctccaagtgtactagggaggtatggaaaggttttgagcaaaggagggataggatctaatgtgcgatttcaaagggctccttgggtgctatgtgcagagtggatctcagcagtggcaggagcaggggcccaggaggggcaggtgtctggacgtggttgcccgacgtagcctgggtgtctgtgttccaggtgaacggctcccaggctggcctgcccctgactctggctggggggcacactccaggccttcttcacgcccttggccatcacagtccaggtggcacccggcctctccatgacctttcacgaatcccatgccctctgagtggcagtgcctgagacctacaccaacaccctctgtggcctgggcggggacttcagcgtggatacccaggatgacttcagcggctctgatagcacatggctctctgatgccaacagcttaatgggggcccagcccctctgtgcccaccagacaaggcagccctataccaggccttctgtggcttgctgggcacccaagatgggccctacagggcctgcagtaaggacgtggatccccaggtgcatgtggagaactgcatccatgacctctgtgccacggggggctcaagagagactctgtgtgccatactggggagctacgcccaggaaagccagcagcgcagcgttcccatgcagccctggagacacctcttggcctgcagtaagtgggtattcccagggagggtctttctcagcctgacctccccagctggcccaataccacttccaggatgtcctcctaggtcaacaccacccaaagtgacccactgcatgcctttctggctaactgttcccgcgaagaacctacctgcttaaaactctgcaataacaataacagatgacactgagtgctattgcatcagtcaggatggtctgggttatgctgaagtaacgaactaacctgaacatgacccagcatgaccaaggttgtttcttcatcactatcttcgtcacctttgtcatcatcacagtcactatcatcattaccgtcaccatcaccaccaccaccagcgtcaccatcaccaccaccaccagcctcaccaccaccaccaccaccagcattaccatcatcaccaccaccaccatcaccacaagcattaccatcatcactaccaccaccatcattgttaccacaaccacaaccatcaccaccatcaccatcatcattgttaccacagccacagccatcatcaccactaccatcaccaccatcatcaccatcaccaccatcaccatcatcatcaccaccaccaccaccatcaacatcatcatcaccatcataaccatcaccaccagcatcaccatcaccaccagcatcagcatcaccatcactactataatcaccatcaccattatcactaccaccaccatcattgttaccacaaccacaactattgtcatcaccaccaccaccaccctcaccactatcatcactgtcaccatcaccgctatcattaccatcaccatcaacaccatcacatcaccaacaacatcaccagccctaccaccatcatcatcattactatcaccacgaccaccaccaccaccattatcaccaccatgatcacgccaccagcattatcaccaccgtgaccacgccgccaccgttaatcaccgccgtgaccacgccgccaccgttatcaccgccgtgaccacgccgccaccgttatcaccgccgtgaccacgccgccaccgttatcaccgccgtgaccacgccgccaccattatgctacatcctgatgatgcctccacctcccctcctttgcctttatgacttacccttggcccccacaaccctctctccgctcccttggtcctattctggttggaaatgctccagaatagtaatgcttgctcaattatttaactcctacctgttttcttccagagctggcctgtcctccccgcagcaattacgagctctgcggctcctcctgtcctagctcttgtgccgagcctgccctgcccgacagctgcctgacaccatgccaggatggctgccagtgtgacccaggctttgtgctcagtggcatggactgcgtgcccccaatccagtgcagctgctccatggggggcaggtaccaccacccggctggggaggccttctggactggggagcgctgtgagcaattctgccactgccaggcctccacccacgccgtgtgctgctccccgtcctcctgtgggccggggcagagatgtgagaccctcaggggcatctttgggtgccacccactctcccctggcatttatcaagcaaccatgcactcacacgtcgcctcctttgaccggaagagtgttgagtttccaggcacttgcgcttctgcttttaccaagtcctgtggctcctccagctcattgcgccttttcaaggtggaaattgggaaggagaaacaagtccagcagtcccattgtgttcatttcaaagatgtaggttcatgggacccaggtttgtctgcagagagagccccgacctgatgaggtaagcactcattggcatctagagactcttgaaccgattgaagctaaaagaaatacattggctcaaactaagtaaaaatcatgtgatagcctagtgaaagtgtagagattctgggtccacagaagttccctatataccactttggctgttttggttacagaaagcctcataaaaggtaactcaaaccagtcacagactgtgttttatgatttttagactaattacataactgaaaattccagagggagatcaggcatggtttgatcagggtgctaactcagtttttcagcatttctcttggtctgtgtttctctatagcattagctttgtcctcaggctggcttttcttgtgatggcaaaataactgccaattttccagtcattaaatgtgtattccccattgtccaaaacccgaatcttttcttaccccaagtactcaacaaaaattccaatgcttcactttgattaaaccccactgagccaatcagtgcagcccagaggttttcttaagcctatctaatcctactcaggagttgtaggtgggagagatcctgcccctaccccccatctctggcagctacttcttgcagggagagagggcaaaatgggaatccacccctgtgtccctatgtcccccgaaaccagtatttcttcttaacaatcttcaaagagtgtaaatgccctggtaaacctccactctgagacctgaaacttttgtctagaacccacaggggtggatgtgttttctaggcccgagggcccctgcctacaagagttccattgttggctattggaaaacacacagccacacccctcccactccacccccttccaggaagggaaccagctttcagaattagtcatgctgtcagcgtcccacacaacgagcccattgactccaaagggcagcacagcagatggactgctattatcccagtggtacagatggggaaactgaggcccgggaaggcagacttgcttgcctaatgtcgcataaggagaaagtggctgtgctaggattggaacccaggctgtcaggttctgagcccttccctttctgtctgtgggcctactgtgtgctcccaaaaagctgtggccaaattaaggaggtggcatgtctgattcatctgtggcggggcctgggatatatagtaactctcaacaatggtgttcattagtccgggcatggaggctcacgcctgtaattccagcactttgggaggccgaggcgagtggatcacctgaggtcaggagttcgagaccagcctggccaacatggagaaaccccatctctactaaaaatacaaaaaaattgcactttaggaggctgaggcgggcagatcacctgaggtagggagttcgagaccagcctggccaacatggagaaaccccgtctctactaaaaatacaaaattagccaggcgtggtagtgcatgcctgtaatcccagctactcgggaggccgaggcaggagaatcacctgaacccgggaggcggagattgcagtgagctgagataacgccattgcactccagcctgggcaacaagagcgaaattccgtctcaaaaaaaaaaaaaaaaaaaagaatggcgttcattcatccactcattaaaaacttcctgagcacctactatgtgccagaccctgggctcagtgctggggaaacagcagtgggtggaacggtcaagatctctccatcgtggtggagctgagattccagaggagagagagacaataggcctcaccagtatgaattatatagtttgtcaggaggccgtatgcgttcgtgtcagggaagaacatacagaacaggatggggaggggcggtggtggcttccagatggaaaagatggttttaaattgagaagccaaggaaagcctccttgagaaggtgatatttgagcagaaccccaggagagaggcactcatgtgcacatctcaggggtgagtgagtcccgcaggggctggatggggcctggtgcattggacgagccacagggaggctggtgtggctggagctgagcgaggggctggggagaagagacgatgaggtcagagaggtgacggggaccagatggtgggggacttatggggctagtgaggacttcgcttttgcctggagcgaggtgcgccgaggacagggctctgagccaggtggcccctgatgggactcaggtggtcccaggctccctttggctgcaggtgggaacagactgcggtggggcagggaccagagcagggagaccagggaggaggctctgggacgtccaagctggaggggacaaaggctgggccagggtaagggcagtgggaggggagaagtggatggttctggaaatattctctggggtcttatcccctcttcaaaccctgctgactgttcctggggccctcaagtttacgtgggcccctggttttgtttttgtttttgtttttgttttttgagatggagtcttgctctgttgcccaggctggagtgcagtggcgcgatctcagctcactgcaacctctgcctgccgggttcaagctattctcctgcctcagcctccagagtagccgggattacaggcatccaccactatgcctggctaatttttatatttttagtagagacagggtttcaccatgttggtccgactggtcttgaactcctgacctcatgatccgcctggctcagcctcccaaagtgctaggattacaggcgtgagccaccacgcccggccgcccctgttgtttttagtactccgtgcactccctgcaatcacacagggtgtgtgtgcagccagacgtggggtggaatcctgactgcccgttaattaactgggtgactttccgctaaacaactaagcccgggtgccgcagtttccctaagtggaagaataactctccgcaggcagttaagtcctgcagccacaagcccccggattattggttgagaatagagagacagtcagcaatcgtaggtaaatgactcaggcccgagcaggggtgtggcgctggcgcaggctgagtgcggcactgccttcttggataccagggtgcagggggaaggggatgtggagatgggtcccggctgccagcaggctgctgggtcagtgcctccccgcagctgagggtgccagccaggatcttagaactgcagactcatggtcctgcctctgcagccaggagggagcctgccagccccagcaccagcctcagagccttggggctcccaccgttagggggctggggctgggtggccaggaggagttaagtcacccacagccaggaaggggcagagctgggacccaaggggctgtgaacggtgaactcatccaggaggaaggagaaggaagacattgtgggagggccaacaagaacacaggcaaaggaaaaatatatagacagtaaaaggaaaaatatatatagataaaatattcaatatataaactatagtaatatacataaatatagagtttcttaagttcatttaaattctgtttccttaactgttagtttacctggttctaaatttacttttccttccactttttcggtgttgttttttatcttgtgatttattattttgtgttaactttaatattacatttttaagggctgggcgcaatggctcacgcttgtaatcctagcactttgggaggaccaggcgggcggatcacttgaggtcaggagttcgagactagcctggccaacatggtgaaaccccatctctactaaaaaatgacaaaaaattagccgggtgtggtggcgggcacctgtaatcccaagctactcagaggctgagacaggagaattacttgaacctgggaggcggaggttgcacagtgagccaagatctcaccactgcactgcagcctgggtgacagagcaagacattgtcttgaaaaaatatattgtttaattgatttttttccccaacttttgagattttcgactatagaaaagtcatgtaacccgtacaatccactcaaatacccttcacatagcttcctcaattcttagtattttgcctgattcgctttatctctttatatctatgtaattttcttctgagtttctgtgtctcacttttcctgtccctatttacttgtccaggcgttttcaaaagactcagtcttctctgttgttggttgaccaataaataaatatttagcctttttctggagggagatcacaaaacaggacagagctcttcctgaatccttcaggcggattcgccctctcttcctgttctgcggaggacagtcctggggcctttgctgtgtcaaccatgccccgaggcaccccagaagctgcatctgtcgagtctgtgctgtaatcatggccttgaaggtggaaggcaggtctgagatgggaggtgacaggagcaggtctgggccggagcaaccgcaagcgcccgtctccttctctccctccctccctccctccttccctccctccctccctccatcaaaccaggcagagctggggcctggggcaccccagggagacagacctgccacctcagcaatggcttccaggtgggaatgggggtcttttagtccagacttttccagagatgctggaaacacagcttgtcctgctgtttaaatgtttgcaattattaatttttgcaatgctttgtaaaaactaaaggtacaatagttgggttccaccctgggaccgccagtttgcaatccttctcttagggactgagtcaggctggggggggggggcgggctgcagggctcccacttgaaccagaagtccctgtcccagatgtctagctccaaatgtgttccctgccctttcctgcttccctgtagttcctgcccgcacccaggacccccagccatctgcccaagccctccccacccccaccacgccgcccccactccccacatgatggggaagctggccaagacattcattcctccacaccccctgcccccatcagcagctccaccctcagcacccccacctcagctcctcctgcaaggcctccgtggatggggggtggcggtggagaaagcctttcttttataattgttttaaacctacttttatttttatttttgtagagacaagatctctctatattgcccaggctggtcttgaactcctggactcaaaggatcctccagcctcggccccccagagtgctgggattacaggcgtgagccatggtgcccagcctggtaattaacagatacttcgtgaccacccactatgcaccaggccctgttctataattcagatgaaaatccctgagaggagctgacgtgctagcaggggaggcagatagcaccacaaaaaaaaaaaaaaaaaagcaaacagaagtcaaaaggtcatagagaggtcagggggtaggtgcgatggtggtcggggaaagccacttgaacctcatggctttgagctgtccagatgcgggagaaaagagagccaggcaagggaataggcattgcaagggctcttggccagaaacatgcctggagtgatccaggaacggcaaggaggcccaggtggccggagcagagtgagtgacaacaggggttagggggaaccctgaacctcccctgagtttccctagtctgtaagatgggggtctccaaccggtggccccagggccttatccaaccactggatatttttcattctgtctacaaagtgttaagaaaacgaagttaccaacatttaaaaatcagggccgggtgcagtggcttgcacctataatccctgcgcttcgggaagccaaggtgggaggatcacttgagacccagagttcaagaccaggttgggcaacatagcgagacccccgtctctaaaaaaattaaaaaattagccaggtgtggtgacgtgcatttgtagtcccagctacaggggaggctgaggtgggagaatcacttaagcccaggagttggaggctgcagtgagccatgattggaccactacactccagcttgggcaacagagcaagaactcaccttaaaaaaaaaaaatccggaaggccgggctcggtggctcatgcctgtaatcccagcattttgggaggctgaggcaggcggatcacttgaggtcaggagttggaaaccagcctggccagcacggtgaaaccccgtctgtactaaatatacaaaaattagccgggcgtggtggcacacacctgtaatcccacctactcgagaggctgaggcacgagaattgcttgaacctggaaggcagaggttgcagtgagctgagatcgtgccactgcacttcagcctgggcgacaagagcaaaattccatctcaaaaaaaaaacaaaacaaaacaggagatttcatcataaaaatctccatttctagcttctgtgggtgagtgatgacgtcagagcagcacagaggcaggtgtcagggagcctgtggactcttggccactgtgtcacctcacatggctcctggaagccaggcggacagtgatacgtccacagccacaccatccccatggtggtgggacagggttacctgccagtgcccactcttctcccacaggtgctgagaccacagcgctgttccacaaagccccaggaagccacattaccctgtccaccggcctctctagccccatcttgcccaggaagtgggaccttggcgtatcgctgtgaccacacctcccagccggtcagcctggccgctcaggctctacctgcaaaggcaaggccccacccaaccagcacccctctcatggctgggggtgcctccaggctgccctctctagggccaggagcctgcagaaacgctcccagccttgaataaagagcaacgaaattattgaaacaaaatcaataaaagtttgaatcagggatggtataacatgctctggctttgattctgtgctttaattcagcgttcctgaaaaacttatgatgtcagaaactatctgtaggtttggtttttttcattttgcaagaattcccaggatatggagaaatcacagccactcacagccttaacaggttctttgggcccaaatgattccaaaagcaaaacgagagaaactttttcaaatatgtttattatgtatattatatacaatatattaataaaacatattacctacatgcatttaaaacataactgaagtcagattggcccagaagactcactccaaatgagacctaatccccaatagggtgcaagtgactgcacaaactctactcctcacagcccttcctaagactcagtgtgctcatcacactagggtctcagagtccttctgaccataaacccaagccccagcgccagcccaacacacacttggacgcagcatgttcacgtccagcctaggaagaatttatggttgacctggattgggtaaaaaccgtaaacgtctgtacctcagaatgtaagatcatggtgtttaaaactacagaacattcagaggttgtcagaagtctctaattgctggtcccccaggttgaaaccagcccttaggttgaaattttgacctgcaaatttttttttaaatctgaaccaaattttttaaattaaacccctttaaggtagtacattttcaagatgcaaaattcaaaaaatataagagggcacgtgataatgagtgagtctcacttccaccccaccctccagcctcccagtttccctctccagaagccatgggtatggatgccaatctccaaaaatattttattcattacaagtatatacatatgcattattttaccgctcacaaatggtagcacactgcacggtttcccaataccttgttttttttccccttagcaagctgtctgggaaatacttctgtatctaaccacgggcaggggtgttcctccaagatttttagacaacagttctccagttcaccccgttccggtgaagggcagagcaccccccgcccttcccagccaccctgtacacgcccctactcgctctcggatgcctgcagttcccaggcttcccagcagagggagacaccattccactcccaagaccaccaaggggtcgtcccagacacaagcttcaagggtctagggaagagacgctatccgcccagacacaaagaccccccttagctatactgagttggcctccgggcctccccttcctgtttctatctcctcctggacctgttgcttagagccctaccccgaggtccccccgcccggcttccttatgggaactggccccgccttaagagtggtaggagggagccttacccttgtctaggacctgggcttgacaacttgccccagggaaccacatagagaaggggtgtagcgctgggcgaacattgccctccccgatccctcagcgatgacaagtggggggtccttctctctgcccccagcaggccagtttccggaagagccttgacccaaacccccttttcctgtcctgtgctccacactcccagcagctgcttctccctggccaggccctgcagccctcctccccgcccccacggtggtgttggggtcgcctggagtccagctggtgtccagggcagagctacccctttcctggccctacccctccccgtgaccccaatcctccgccaaccgctcaaaggatccttgttctccatccagcccccagacaaaagtccctctgtctaagaaggcggaattgaggggagggggcacccccaactgggaccatgggggagcctgcacagaccccatccggaaggaatgcctggaggaggaggagcaggagacaggggaggaaagggggagggaggcttgtacagtgctgggggccttatgtggactaggaggcagccgcccccaccagcacccactctgtagacccaggcgtctggctcccagcacccacggaaagagcctggctaggaaactgcagcctggtgcctggcagacagttctcattctccccagggcagggagcaggttatgaccaggactaaggtcccagagtccccaccctgacccctccctgctgttccagccgctccctcatatccacccctgccccatctcctgactttggtcacgctagcatcttctgctgatcctgaaattgtaccagcggcaagatgtggcctggaaggggactttaagttctccacaactgccagcaatccttccaccaggcaaaacacatcatctaaggaaaagaagtgaggtcggaacaccaacgcatcatctcactgcatggccctggaggctctgccgtttaaagaccccagaaccttccccattcaaggtcctctcctgggcacaggagattggagaaagctcctcccttaattccaggggccgagttccagcccatccaattctccgtctcacctgaggctgctgtggtcctggtgaccccagggagcaacctgccgcccatggctggggagggggtgaagctgtctctttaagagcaggaatggagcccctgggcctcagggcatctgacttgttttctacctgcccaggtttgcttagggcgtggcagcttcggataaacgcaggactccgcctggcagcccgatttctcccggaacctctgctcagcctggtgaaccacacaggtgagcagctggggccccttcctccaagccctccttgtctctgcccctaaattaggaagtatctacctgccccctgaccctgccccatagaagcttttatgttaaagcgcctaaaatcttgtgaaatgcttttctggagccaggagataaacggaagtcccttcccctaatgtccctttccccaccattctcctctcagggacttgttgaaccagctgaggtgagggcaggactgataagtgtggttggggtgtctgaaagactagtgtctgcatggattagggatatctgggttggggatagctgggtggaggagagggggtgcctgggtaggtaggggtatctaagtggaccaggggtgcgtagatggactggggacatctgggtggatgaggaatgctgggtggactcggggtgtccagacattgagggatctgggtggataaggagtgctgggtggactcggggtgtccagacattgagggatctggattctggagacctccaggaaaaaaggatggagctgctgggggaagctttaaatggggagttgcttgggagatttcaggagcacacagcgggcaggatctttctacccacccctgaacatgagaccattctcccatggtatggaggaatagaggggatagcagagggcaggtgggggaaacagtcctcaggccggccttgggacctcatggccaggaaggatgagagcaggtagacagagcatcagctgcagggctgccttcctctctaacctgctcaccaaccacatcagttcgggagcagcccacagcctcttcagacaacagcctgaatggggaacgtgagggcagacccagctcccggctccctgcagcctccggaagcatgggactggacgttgttttgcagaggctggggcgaggaggataccatctgtcagtcttggctggatgacatcatgggaagggggtatagtggggccttgcaggccagaggtggcttggaggagcccctggaaagaggcttaagaggtgagactcaacagccatggcgacagagcatagggctttaagatgaatttgcaggggttacaggattacaactgcaatgtgggctaataatagtgccccctgcattaagctgcagagattgagcgagtaagtgggaagctgagaaaatgcccccatggggtagacactcaataagcatctgctgttattaccaggactcgtatggtcatgggtgacagcttcagaccacaggcagtccacctacaacctgtgcccctatccaacatgccatcctgcccacccacccacgccagctcccccaacccccaacacttttggggatcctaaacacttcctgggcctcagtaatgctccccaaagcctcaggctttcttcccgcaaaaaaaggaaaagaaatggatgctccaactaaaattgtgagttcagcatgtggaattaactgggaagctgagaggattcccaggccctggggtgccaggcagagggaggagtctgtgccaacctgcaaggaccacccgcaccgttggttgcgggcaccaccctctctcagcatttttgctgttcgtgaaatgaggacatagtggacgacgtcggggattgctggggggttaagtgagtgagaacacggcaaggtcagtgtgcactccagggcaaggtggaggaagtgccagctctcgctatcaaaattataactaggccaggcgtggtggctcacacctgtaatcccagcactgagggaggccggggtgggtggatcacctgaggtcaggagttggagaccagcctggccaacacagtgaaaccctggctctaccaaaaatgcaaaaattagccgagactggtggcacacgcctgtagtctcagctactcaggaggctgaggcaggagaatcacttgaacccaggaggcagaggttgcagtgagctgagattatgccattgcactccagcctgggtgacagagtgaaactccgcctcaaaaaaaaaaaaaaaaaaaacaattatgataactatgcactcagcatttgggcagggacagggcagggacagggcaggggagggcatgctcggaggccagggcttggtgcagccttgcaggctggtgagagggcaggactgatgccaggtcaggaaggagagagaaacgagttccttatgctgagcaggtctacctgggaaagagaaagtgtttgctgtcaccaggaactctgctgggcctagggtagggtcaggggctgggctggggaccccggctaggcagagccagggctgggaccgggaagggcatgggtgtgggatgaggggcaggaggttcgggggaacagagatggagctagggctgcagccaggaggtagagtccccctctacccccagtcccagcctcacgtcaattcctccacacaccaccccacccccaagcagcttgaagaacctgctcagtcctcagcctgaagtctgcaatgtcctggcagggccgggcaggctctgagcggtctacggagacactcctgggaagcgggcctcctgccgcctggctcccaatgccccgcttccccaaacaccccaaggccctgacagtccctagttaggagcagctgctggggagccaggcctggcttaaatcctacttcctggctagagcacctagtttcacctctcagagcctcagtctccccatctgtccagtgaggacaacagcgggcagtggcgcccttgtttggttgcggggcgattcccagaaagcctgaagtccatgtccagtgagttattatggctcctcccgcctcaggcccgagtttcacccagtccccactccacggtgcagctgcggcttatctctcagcccagcgagatgccagccttcctgtcccgggtgagctgcgcaccctgcctggggagcaggggaggagggttggggagccacaggcacagggccagcctcccggtggctctgctaaggccagacctcccgccacccctctaggccagcgctctgacatgcagaaggtgaccctgggcctgcttgtgttcctggcaggtgagtacccatcccccgtctgccttttcctctggatcccctggatgcggggatccaacctctgtctctctcctgtgcttttctacctccccgggaaggtggtaaatgttagaacagcatctccctgagggtaagaaaagtcagactagtgatagccggggatacacgagaagagctggctcacacagctggaaagtcaccgtcttccccattctctcgatctcttctttttttttggctttttttgtttttgtttttgtttttgtttttgtttttgaaagggagtctctgttgctcaggctggagtgcaatggcgcaatcacagttcactacagccttgaactcctggggtcaagcgatcctactctcttagcctcctacacagctagaatgccaggcacacgccaccatgcccagtgcatttttgattttttgcagagacgaggtctcactgtgttgcccaagctggtctcaaactcctggctgagtttgatcctcccacctcagccttccaaagtgctgggattacaggcatgagccacactgcactggccttgattgactattaaacagaaataacggaagctagagaagatgatgaaatgacaccttcaaagcactgaaagaagataactgccctgccagttctctaaaaacttcaagtagaaggctcagctcagtgcgactgcatctttaacttccaaacacttttcccttttttcttttcttttttttttttcggagacagagtctcgctctgttgcccaggctggagtgcagtggcatgatctcggctcactgcaacctccacctcccaggttcaagcgactctcctgcctcagcctcccaagtagctggcattacaggcgtgtgctgccatgcctggctaacttttgtatttttagaagagacaaggtttcaccatattggccaggctggtctcgaactcctgacctcaagtgatcctcctgcctcggccttccaaagttttgggattacaggcctaagccactgtgcccagcccgctttttactttttcactgcagccttgacctcccaggctcaagagatccttccacgtcagcctcccaaagctctgggattacaggcacactttttgtccattacatagggcaagaccagtattccctgcagggtagtgatctaaaattacattttcaataaagtctatttaagtgtataatagtgagtcattttcaatgatgtgcaaacaccagaccaggtgggtgtggacatggtggaagcgggaggatgggctttgagcatgattggacttggggaaacaggaatctgggaactgaaaccatctgtcgtcttgaccagaaaagtcccccgctgctgcaggaggcatggattaaccacgtgtctggaaacatgagaccaaatagtggctaaaaacctcctagattagaacccatttcaggtggcagaatgctggcgtgactcggaggtgtggggctgagtgggcgagtccacatttcctcgttgggatatgaggggatgaggtggctgctcagtgacaggacccctgtcccgcaggagaccctttcccaaggcccctgaaactccccaggccctgcccaaaggcttggctgaggccggcatcaccatctcccctccttcccctcttctcccactaggctttcctgtcctggacgccaatgacctagaaggtgagtcagactggactctcacccgtcacacccccaaattctcccctgggtggggaaggcctgcatcctggctgtaatcctggattcatgatcttttttctttccttgcagataaaaacagtcctttctactatggtgagagcccgtgccccctttcccctccccacaaccccacatactgcttggtgccaagggttcccatacagggttggggcctgacgtgagcatcacaggacaaagatacgaagggactaggatggggttactgaatatgccacacagtggattaaaggaactagaggcagcaacctggcctttgggaaggttctattccagcaagatagacacacgcaggaggtgaggacagtttgcaagaagccattggttggttcagatcaactgctgggagaagtgttgacttgagaaaacttcctggaggtggtgagctattggatcaaaaccctcatctggcctccaggttccaatgacctgctccctactccccgctctgccctcacctctccacgctcctcattccttctgctccaagcctctcagacacagcagacatactgccagcctcagacctctgcacctgctggttcctctgcctggaacacttccttccacagaaccacatggctccctcccttccctctgctcaaatgcagccccctgagaggccttccctgacaactccctctaaaagagctgccatctgactttttttttgttttagagacagcgtctcacactgttgcccaagctggagtgctgtggtgtaatcatagctcactgcagcctcaaactcctggtctcaagcgatcctcctgcctcagcctcctgaatagctgggactgcaggcatacaccaccatgcctggctaatttttgtatactttgtagagatgggttctcactatgttgctcaagctggtctagaactcctgaactcctgaagtcccaaagcactgggattatattaggttggttcaaaagtaattgtggtttttgcaactgcttttaatggcaaaaatgcaattttttttttttgaggcagaattttgctctttcacccagagtgtgactggctggagtgcaatggtgcaatcttggctcactgcaacctctgcctcccgggttcaaatgattctccagcctcagcctgctgagtagctgggattacaggcgcctaccaccatgcctggctaatttttgtatttttagtaaagacggggtttcaccatgttggccaggctggtctggaactcctgacctcaggtgatccgcccaccttggcctcccaaagtgctgggatatcaggcgtgagccaccatgtctagccaaaaacgcaatcacttttgctccaacctaataggtgtcagccactatgcccagcccgccctctgactttccatctcccaccccacttatttttcttcaaaccacttatctctgcctgaccctgcacgacagatcgtgtttgctggtgtgtgaaccagaatgtgagcacctgggattttgtctgttttcttatggcggtgtccccagcaccctgtgcatcctaggtgctccatatatatttgtcaagagaatggggggacagatggagaggacacaggctggcactgaggtcccctccactttcctcctagactggcacagcctccaggttggcgggctcatctgcgctggggttctgtgcgccatgggcatcatcatcgtcatgagtgagtggaggagctcgggggagcaggcgggccggggctggggctcccctcccctgaccactcagctctccccaacaggtgcaaaatgcaaatgcaagtttggccagaagtccgggtaagatactgttccggcatgcccgcctcaggctgactggacgcttttcagggtgaaagggctaactctcccagcaggagaggcctcggggctctgccctttagagttcctgccgctaagatttccaggtttattgtttctagctggtaatccccagggggccccaaatcctgaaatgctttggcccctgggattgcacaaccccccaaatggaaaggcagccaggaagacatgtctgggcaggctaagaaccctctatccggagggagagggcaaatgggggcggacaccaatctcaccacttttgtctccttagtcaccatccaggggagactccacctctcatcaccccaggtaagatggggcagcatggggctcaggggaacacggaagtggtgtgtgtgtgtgtgtgtatgtgtgtgtttgcacactggaaagaaaagaactcaatccaccctcacaaacggaccccatcacttcccgcaggctcagcccaaagctgatgaggacagaccagctgaaattgggtggaggaccgttctctgtccccaggtcctgtctctgcacagaaacttgaactccaggatggaattcttcctcctctgctgggactcctttgcatggcagggcctcatctcacctctcgcaagagggtctctttgttcaattttttttaatctaaaatgattgtgcctctgcccaagcagcctggagacttcctatgtgtgcattggggtggggcttggggcaccatgagaaggttggcgtgccctggaggctgacacagaggctggcactgagcctgcttgttgggaaaagcccacaggcctgttcccttgtggcttgggacatggcacaggcccgccctctgcctcctcagccatgggaacctcatatgcaatttgggatttactagtagccaaaaggaatgaaagagagctctaaccagatggaacactggaacattccagtggaccctggaccattccaggaaaactgggacataggatcgtcccgctatgatggaagtgttcagacagtttataatagtaagcccctgtgaccctctcacttaccccgagacctcactttattacaagatctttccaaatacccaaatgtccctgcaagcccgttaaataattccctatgctacccttaataacatacaatgaccacatagtgtgagaacttccaacaagcctcaaagtcccttgagactccccaatacctaataaggcatgcgaaatgttctcatgaactaccccacaacacgcctaaaactcaaaacacccaaaaatatctcctccaatgtcctgaaacatgaacccaaaaagagacccacaataaactcgtgacttgtcccctcatcatgccgttttatccctcaaacatcccctgagtccctccataaccacgaacccacactcagagaccatgaactgcggaaacgcctccctgggacctgggccgctccgagcactgctccagggacaccatccccgccctgtgccgttcacaggacatcctctcccaaggatccacaacactgggcggggagggtgcacagcgcatttattgagctcggactcgtcttgtccttgcctccgtcgcccatctagaagggcaccaggctccccgcgacacctcccgctgtccctccctgtgccccggcgcacgcgcaagaggcgcaaaaggcacagcttgctgggcggccgcacgcatgcgcacaagcagcagaggggaacccgcccagtgctgagttgtcttcgaggttggcgctcctccaggaaagcgattggctgcgtggagtttagaatgggaaaggaatgccatcaacccctcggtgctttcagagggaccagcggggtaggagcgggttgagaggggggctccgggacctcatggagctctgcacgtgacctccacctcgactccatgcagtgcaccagcctgcaccccccaggttgcctttgatggggaatctgccccagccgagatgtccagatgttgctttagacctgaagggcagctcgggaggtccagtaggctgggaccctctatgtccccccatgggtgcagatcctttaagaagtgggcttaaggcctagacgtgtggctgatgaacgtggcccacggtcagcagctcacaggcgggccatcaccccaagtagggccaggagccagccaaggggccgtccaggggccccagccatgcccagagtcccgttggtggtctcaggcactgaggtcgatctcgtgatgctggtagatctgtgtggggcccttaaagcaagcagcaaagaggaagcgtctgccggccatagtgatgtgggcaaaggcacggggggccaccagggccggaggccccagctcctgcagtggctccaggagccccttgtcaggctcaaggcggaggacctggctgaaggcgaagtcgctgcctaggatggccagctggtccctggcgatgagcagtggctggaagacgtgggcaccgcgcgagggaagttgctgcagcagacgaaacatggagccgtcccagcgcatgacctgtgggggtgtggccagtgagggcctggggtcccgggggtctctgggggccgtggaacagcttggaagcagaagcctgtcggtcccaaaactcccatagctttcttatcttcataaaagtcaccacccacctgttcggccacacacatgcagttgttctgagcccttcccttgccctcacgccccacacagaagcactcagccatggactctgtcagtttcaccttctacagttgtacatttctcccaccacctctggctgaactccatcccctcctgactggaccatcctggcagcctcttccctggcctctaggctcctctccctgctcccccagtctgttccccacccagagaccttgtgaacacctgagtcagatcagggcccttccagactcagaaccctcccctgcctgcacctcactccagaaacagtgggcagtgcttaaccctagcatcagccttgggggctcagtgtcagggtggggacaggtgtggctgtggtgaagtctggaatgcatccgagtcacagagccagcatttgggggtagaatcaggatgttggggccagcatcagtgtcggggactggggagtggttcggagtcagccagccttgagggggtcagagtcttggcatcagtgtggggtggggtcctggttcaaaggtcggcatgtgagggtaggtcagagtttagaggcttagtgtgcaagattgggtcagtgctgaaaagccagccccccgcccccaggcccagcctcaccatggagtccccaatgtagcgtgtgaggcacaggaacacgtccccaccagcctggaagtggcgtgtggcatagacatcctcggcctcggggatgtctgtgcgtctctcgaagcggccaccggtccagtggaagagcacgggccgctgggaagccgaggccagcagcaggtggggccggccgtccagctccagggcctcagcgtccgtgtcccggtgccaggcgtgcaggctctggtgcgggtaaaagccgggcccgtcgcggcacagcagcgtggtgctgcccgccttggaggcatcggccaccacgaagcagggttgcccttccagccacaggagctcggcgtcattgggccgcagcagccgccgcggggccagggtctgcgttggggccaggcgcaggccgggactgggccgggcccacagctgtgagcccccccacaggcgggcagccagcacgaagaggctcgggcccagcaccagtggcttgcaggacaccacggaggccgctgtggggaggtggggaggcaggtcaggccagccaggcaggctgctggacaggcagaaggacggggagggggctcaccgggcagctcttcctcgggccggaagcgctgcaggctgtagtcccaggagagaatcaggcagcggccggcgaagggctgtgccagcacaatgtgaggctccccttggtaggagaagggctctacgctcagtgccgactcccccaccgtctggaaccaggacagctctgtgggtggagaagagagtcaggcaggccccaggacccccagggtcctcattgctgagcctcagtttgcctacatctctgaaatggaggccattcatggtacccccctcatagggacatataactggaatcttgatctgtagatgtttgtttggtttgggtcgaggggtattttgttttgttttgagacagggtcccactgtgtctcccaggctgaagtgcagtggcacaatcatagctcaatgcagcctccaccttctaggctcaagcaatcctccttcctcagcctcttaagctgagactacaggtgtgtgctaccatggctggctatttttttattttttgcagagatggagtcttgctatgttgcccaggttggtctggaattcctaggctcaagagatcctcctgccttgacctcccaaagtgctgggattacagacatgagccacctccacctcctgggttcaaacaattctacttcctcagcctcccgagtagctggaattacaggcgcccgctaccacgcccagctaatttttgtatttttagtagagatggggtttcaccatgttggccaggcttgtctcgaactcctgacctcataatctgcccgcctcggcctcccaaagtgctgggattacaagcgtgaggcaccgtgcccggcccataaatcttattttctaagctgtgtggcatcaccaaataatcccttagaaacagcatctggattaattcatttaacttcacaacatccctgtgaggtacattctgtgatgatttccccttcgcagatgagaaaacaaaggctaactggcacaggcagtctgttatccaacaaaatccatccttcccaccttccaggagagaggattggagctggtcaccaggccacccagctagaggctgcattatcccgggacccccattcaccgccctcgctgaaagttagatgtggctgttttgagactgagtaaccagtggaacaagggcagatgtgatgagtgtaatgagccaccacacctggaaacagcttgtcccaacttggtctcctttcccaccacgtgggtgtgccacaacctggtttcaagcctgaaagcaaggacaatgcccagggactgccccacgtacctggacagctcactccagatccttctatccttaattcatggtattttgagagtttgtgacagcggcttggctttcattgtcactggggcaccaaggctgctccgcttgttagtaggggagctgggcagttgactccaggctgtaatatttcactctgcgtgccaggccctgtttccaggtgccagcgttgaagcaatgagccaaactacatataatgcccacctaaagggcgaatcttttttaaatggctatcaaatcacctcttgctcaaaactctcagccgagagtggtggctcacgcctgtaatccccacattttgggaagccaaggcagatggatcagtagaacccaggagttcgagagcagcctggacaacatggtgaaaaccccatctctacaaaaaatacaaaaaattagcaggcatggtggtggtgcacctgtagccccagctaccagggaggctggggcaggaggatcacctgagcctggggaggtcaaggcctcagtgagccgtgattgtaccactgaactccagcctgggcgacagagtgagatcctgtttcaaataaacaaacaaacatacaaaaaactttctattcttgccatggcccagaataaagtctcctctcctctctgtggcttccaaaatccatacctgtccctccactcactacccctgagccacacctgccttcgtttgatcttcaaacagggcacactgtatgctgcctcagggccaccggccaggctgttccctctctctgaagagcccttccctctgttcctcacttagccacatcgagacctaacatccccacttgagagaagccttctctgactcccataggaaccctcattctctcatcactccttgtagttatcacaacgtatagcacacattgatctgtgccgtgtttgttaaatgtccatctccccaaactcccaggactgtaagtcccgtaaggccacggctcaggtcgcaaccacagtgaccatcacctctcacagggctgggcactgagtggacttcagtgaacatttgttggataacttgaatgaagagggactccctaagttaaatccccttcttctatgtgtcccacagaccaaaaacatgtctttcttacacttagaataataataattatatgctgataataattatgtatgcatatataattatatatatattatatatacatgttgtgggggaaaggaagagagatcagactgttactgtgtctatgcagaaaaaggaagacataagaaactccattttgatttgtactaagaaaaattcttctgctttgagatgctgttaatttatgaacttagccccaaccctgtgctcacagaaacatgtgctatattgactcatggtttaatgaatttagggctatgcaggacgtgctttgttaaaatgtgtttgcaggcagtatgcttggtaaaagtcattgccattctccattctcgattagccggggacacaatgcactgtggaaggccgcagggacctctgcccaagaaagcctgggtattgtccaaggtttccctgcactgagacagcctaagatatggcctcgtgggaagggaaagaccttactgtcccccagcccgacacctgtaaaggatctgtgctgaggagtattggtgaaagaggaaggtctctttgcagttgagattagaggaaggcatctgtctcctgctcgtccctgggaacggaatgtctcggtgtaaaacccgatcgtacattctgtttactgagatagaaaaccgccttatggctggaggtgagacatgctggcggcaatactgctcagctactctttactgcactgagatgtttgtgtaaagttaaacataaatctggcctacgtgcacatccaggcacagtacctttccttaaacttatttatgacacagagtcctttgctcacatgttttcctgctgaccctctccccaccattaccctatagtcctgccacatccccctcgctgagatagtacagatagtgatcaataaatactgagagaactcagggaccagtgccggcgcgggtcctcacttgctgagtgccagtcccctgggcccacttttcttcctctatactttgtctgtgtgtcttatttcttttctcagtctctcttctccaccttgcgagaaatacccacaggtgtggaggggcaggtccccttcatattgttatagataataataattattgctgttgttattgtattcatagcatctgtgg

SEQ ID NO: 57 - DNA, 161994 bp, Homo sapiens
gcttccggaggatggggagaatctatacgtggtgaccaagaccatggagatgctgaagaaggggggtaaggccagaggggcagttccatccccgacctcactgctgtggggctcaaggttgggaatctctgagatgccttctctgccccatcccttccatgcacacttgcccctctccttcccccacgcagcccctactctcctctgcattctatgccatttcccttcacacttttatcttttctaaggactttttcatctatcatctcacaggaatcccctgaggaaggcaaaattgctattgcaatcaccatttcgtacagtttaggaaactggactttggaaaagtccagggactgacccaaggtcaatctgtgagcaaagcccaggttttgagattcccagctggctctttcgccaggcagctccactgcagccagggttctcccaccatctgccagggttcccttctttcattctctcccatctcctcccctcccctcccctccctgccctgtggacagctgcatttcccagggctctctgtttccacacgggagcatcatcatggcctttctccccaagcagtgggtcactggggaggagagctggagtcacagagtacagtgtgagggagggaaggggaggggaggcggcctcccaagggacggttcctactctgagccaagccctcagagctgagctgaagtctggaagtttggagtcttccatttctgtttgggctctgccccccaaaccagctggcgactccaccccctcctgggtccctcccaatccctattccacatcccctgctgtgtggctccctaatgcctgcacctacgtgtcccctcctggaggcaacactatatatattgggtgcaggggcgggtgggggtgggaagggacagagaagtcagagacagccagtgcccagtgccccatttcttcttttttttgagacagagtctcgcccttgttgcccagactggagtgcaatggtgcgatcttggctcactgcaatctccgcctcctgggttcaagcaattctcctgcctcagcctcctgagtagctgggactacaggcgcacaccaccacacctagctaattttgtgtttttagtagagatgggagagaatccacggggccctgtccctctgggacacacacacactccccttccagtggaatgaaataggagagatagggagagacagtttcaccatgttggccaggctggtctcaaactcctgttctcatgtgatccacctgcctcagcctcccaaagtgttgggattacaggcgtgagccaccacacctggccacagtgccccatttctgaccttcacagacatcccccatccaagaacaagaagctgaaaatgccctcagaaggtcagagaagcagagggctcttctccccatccccaacccaaaggtggacaaaaccttagaaggtgagagggacacagagacccctttcctaagcaaaggaaagaaatctgtcaagtcagcagctgaagcccagagccccttcgcaagggaaagactttggggtgatggtgggtgggatgcagaggggtcccctggacattggcgggacgtagtgctgactgtgatggcagccacgggtttcttgggccttttcggtgcatcctccccgcaagcctccaccacgctgttccaggtaggctgaggttaggcccactcagggcggcaccttggcgcaggacacctcttccgtttgggctttccgtcctcgtgatttcgctctccatctgacagtcatccatggtgacagggtgtgtccctttcccctaaacaggatcctcaatgcccatcggaaaacgttgtaaggcgttgagcccccaacgccccctcaccacaagaccctgctgtgaccatcttttcctggtgaggagagtctgcacgggggagcagggcgccataccccagaaagaaacctctgtgcctgggagtgagggactcgctgagtaaagtgaggtcgaagagggtggagaggggtagggtcccagtcaccactgtcctgaacccacagttcagtccgggcccaagatggccccacaggagcacagggggtttcgggcgctgcaggtggaggtgaaggaccagctgcggtgcggaaaggcctgacccgggcggcagatcgcctgcggagagaatgaccggctggggtggaggcggggctggggtggtgtgggcgtggctggggaggcgtggctggtgtggtaggcttaagcagtgagggcgggactggggcagaggcggggtttgggcgctgagggcggggctggggctttgaggaggtggctggggctggggcgaggctggtgcggaggcggggttggggcggtgagggcggggctggggcagaggcggggctggcggagtgaaggcggggctggggtggtgagggcggggctggtgcggaggcggtgcgggggaggtgtgggtggggctggggccgagacggagtttgggcagtaagggcggggctggtgcggaggctgggctggtgcggtgagggcggggctgggtggaggcggggctggggtagaggcggggctggggcggggtgggcggaattgcgggctgcggggcagagatggtgatggcgtccggggggcggggctgggtggacggccggactacaagggacgagaggctgggcttaaggtagcagggggcagagcggattgcccaggggcggggcgggatcggggacaaggctcaagtgctgaggaccagacatgcgccggaagcccaagcccggctagcgagtaggagggtggatggtgggggatgataggctaggcttaagatggctgagggcggggatacaaggtggtagggccagagatgggctggatggggcgtgatcggcctcctcctgggagatctcagcccacctgagtaggcttcttccggccgcaagagagactggggcctggccctgatggaatggccattctgagcgtgaagacctgcgtccccctcccttcaggaagctccctgtctctcaaatttcagggggatcatcacttcccatctctctgccaggttgatcgagttctggatctacaggagccagttctgagagggaggactgggggtaggaacggggtctttgaatggctgcgggactgcaggagacttccagcaacctcagctccatgttggaggaacattctgtacctgctgggtgctctgtgtggtgagggtcagggatgagggtgagggccatccctgatgtaccaggcctactaggttaggcccaatggtaccaagcaagacctaccacaaaagttaagggtcccagtgcaaaatgaaaatgcaggactccttgctacaaaagttattaagaattatatttggccagacgtggtggctcacgcctgtaatcccagcactttgggaggccaaggtgggggccaatcacctgaggtcaggggttcgagaccagcctggccaacatggtgaaacccccgtctctactaaagatacaaatttagccaggtgttgtggcacatgcctataatcccagctacttgggaggctgaggcaggagaatcgctcgaacatgggaggcggagtttgcagtgagctgagacctcgccattgcactccagcctgggcaacaagagcaaaactcaaaaaaaaaaaaaattatattcaagacagtagcagcagagcattaaacgaagcatggggctgtgtgcaactgcacaggttgcatgcccatgaagccagccctgataccaagctacaagcagagtgggcagggtgcagaccctattgtcccttcctccaaggaaaaggcaagaggggcaagcccacctaccatccctacgccagctcatttttcccaaaaggggaaaagggaacataccattccaggaatctcctctcatcctctcctggaggagaaaaaatgaatctgccgcccacttcccctccacggacacacatgggagctaaccccagttcccagagccactttttttttttttttttttttttggagacggagtctctctctgttgcccaggctggagtacagcagtgggatctcagctcactgcaacctctgcctcccaggttcaagcaattctcctgcctcagcctcccgagtagctgggattacaggcatgtaccaccacacccagctaatttgtgtatttttagtagatgggatttccccatcacggccaggttggtctcaaactcctgacctcaagtgatccgctcccctcagcttcccaaagtgctgggattacaggtgtgaaccaccacacccggcccccagagccactttacaatgccctgcccacagaaggagggagagcatgccgtgtccctcatgccctttcctctcctttaccctctgcagagctgagtgaggtgcaacagcagctgctggccatgtccagggagaaggggatcctttcccaataggtggagctggagagggacctgggggatgacaacgaggagaaaattgagtttgagctcatccagctccacccccacacttgtggatgggcagtctgaggcccagagagcacacaagactttagggccacacagcaggctcttagcagaactctctacagaacttaggtctccggattcttaatccttgcccatctctgcttcactctagcattaacagacagaggggggatcaaggatggggactgtaataaaatagcttgttgaatagcaagagaggctgggtgcggtggctcacacctacaatcccagaactttgggaggccgaggcaggaggattgcttgaggccaagagttccacaccagcttgggcaacatagccagaccccatctctatttaatataggaaataataaaaaataaaaagtaaaagaatggcagtgtgatgccaccttgaagcaaaactgccatggtgactggtattggattcctgattctggcagcaaagtccttaaacaatgcctgtagcatagataacccctgtattagtccattctcacactgctgtgaagaaatacctgagactgggtaatttataagggaaagacatttaattgactcacagttccacattgctggggaggcctcaggaaacttaaaattatggcggaaaggaaaagagaagaagacaccttcacagagcagcaggacagagtgaatgcaagcaggggaaatgccagatacttataaaaccatcagatctcatgagactcactcatgatcatgaaaacagcataggggtaaccacccccatcactcaattacctccacccggtcccacccccaacacatggggattatggtgattataattcaagataagattttgggtgggggacacagcgaaaccataccaacccgtcataaagcaacaatgcctgtaacacagataatccctcatatagatgtgtatctaacctccccagtggccatgacttttgcaagacagtctgagccatgactggctgcacctgtttcactctaaaggcttgttatagaaaagatattttctggacagcaggtgtggggaaccacttttgttcataagtccctattaaatgtttctttctaagaagctggatttgtcagcctctttctttctttctttcttttctttcctttctttcctttctttctttctttctttcttctttctttttctgagacgaagtctcgctgttgtcccccaggctggagtacaatggcgtgatctcggctcactgcaactccgcctcctgggttcaagcgattctcctacctcagcctcccaaatagctgggattacaggcgtctgccaccacgcccagctaatttttgtatttttagtagagatgggagttcactatgctggccaggctggtctcaaactcctgacctcaaataatccgcccgcctcggcctcccaaagtgctggaattacaggcgtgagctaccacgtctggcctgtcagtctccttctttggcctttcgattcccttggcctttgggggtaggtttgcagatatctgctcactgcagaacagcgacaggggctgaaatttaaatttttactgaaaattaaaatttaaaattttactgcaggccaggcatggtggctcacacctgtaatcccagcacttagggaggccaaggcagacagatcacctgaggtcaggagttcgagacccatctggccaacctggtgaaaccccatctctactaaaaatacaaaaattagctgggcatggtggtatgttcctgtacatacagctacttgtggggctgagtcaggagacttgcttgaacctgggaggcagaggctgcagtgagccgagatcgtgccactgcactccagcctgggcgatagaggaagactctgtctcaaaaatagacagacagacagacagacagacagacagataataaaatacaattttactgcagaccacttctgaagttggtggctccctaaatgcaaagcatcctgtgatgctttttctccactgtgcagatggaaaccatcctggactagaatttctttcagggagagatggagcccttctgtctttactttgagctgctcagggggttctgaggtgaggagctgaaagtggtcaggccctgatgggactctgtggccttgacatataaggagaccaaggagacagatcctccttacacctgggagccaaatgccttgacactgctctgtgtcctgtaagccagcctctccatctttcgggtgctggccaacaacacttggctctccagatattttattcatcagggatccccagccctgcccgcccatggctagggaaggcaggatggggcttgaggacaagcctaggggagctggtgaaaatacagaatagtggccgggcgcggtggctcatgcctataatcccagcactttggaaggccgaggtgggtggatcacctgaggtcaggagttcgagaccagcctggccaacatggtgaaaccccatctatactgaaaatgcaacaattattcgggtgtggtgtcgcgcatctgcaatcccagctactcgggaggctgaggcaggagaatcgcttgaacccggggggcggagtttgcagtgagccaagattggcactccagcctgaacaacaagagcgaaactcaatctcaaaaaaaaaagaaagaaaaagaaaaaaaaatacagaaaagctccaacacatgctcccgtgcatcagcaggggctcaggaagaggtgggttgctgggaggatcacctgacagaagagagttctctgggtttgggctggaggctggcagtggcctccttgcccagacagggctgatgggtagggggattggcagtggaggggtgggggcagtgagggctgacaccttgaagctggatgctgagtttgacacacttagagctgaacactgatgtctgttcagccagagtctggggaggtcttggactccaaagctgatttgggaatttgggaagaaacattaaagctttttagagaataaggaaagagtatgggagctttactctgttcagaaaggagaatttatggaagtatagctcacaatctatgatctgcacccccaaacatccaacctcccatatgagagataaaacacagcatccctaggaagcattattcctgcgcctccaccaggcagtcatgccccagcccagcctgtcttcatccctaaccattaccattccacctccttttgttcagggcaggtctgggaatatgttcatgtgagggatcacttcttgcaaatgctccagttatcctgcacccttcaagtaggctccaaatcctacaacattctccttgccctcccaactcgcagggtgccagcttcttcccattctggccagagtttgtgacttccatgaacgcccataatctacttttctctgttttctctgaccccatgctgagggggaaatcaacaataataaaaaggaggccaggcacagtggatcacacctgtaatcccagcaatttgggaggccaaggtgggtgtatcacttgaggccaggagttcgagaccagcctggccaatgtggtgaaactttgcctctactaaaaacacaaaaaatagcccggtgtggtggtgcgcacctgtagtcccaggtactcgggaggctgaggcaggagaatcacttgaacctgggaggcggaggttgcagtgaaccgagattgtgccactgcactccagccagcaatagtgtgaggctcggtctcaaaaaacaacaacaaaaacaataacaaaagggaaaatgagtaaggaaataatgccctgtcccaatgactgtgtctgtctgcagtgcactctatgggtcagagagacagcaatggtcccacggggcaggtgcctggggcttcctctcctaaatcaattctctctcctgatccctgtctcctaacaaccctacatagtcacaagcttggtctctaaatcagaggtgatcattgtccatcactaccttaattgaccaccagagggaggtagagagcaaagtttaccgcctgcctgagcagcactcaccgcatgaccaggtcctgcttccttattgtctcttttaattgacctgaagcgtccttacaaggcagtctaacttaaatatccgccagtacaatttaaattctgccccaggccgggcgcagtggctcacgcctgtaaccccagcactttgggagaccgaggcaggaggactgcttgagcctaggagttcaagatcagcctgagcaacatagggagactcccttctctacaaaaaattaaaaagtgagccaggcatggccgggcgcagtggctcaagcctgtaatcctagcactttgggaggccgaggcgggcagatcacgaggtcaggagatcgagaccatcctggctaacatggtgaaaccccgtctttactaaaaatacaaaaaattagccaagcgtggtggtgcgtgcctgtaatcccagctattttggaggctgaggtaggagaatcgcttgaacccgggaggcggaggttgcagtgagccaatattgtgccattgcactccagcctgggcgataagagcaagactccatctcaaaaaaaaaaaaaaaaaagccaggtgtggtgacacatgcctatagttccaggtactgggagcagggagcgggcactgagatgagagaatccctttagcccaggaagtcaaggctgcagtgagccatgactgcaccactgcactccagcctgggcaacagagtgagaacctgtctcaaaaaaaaaaaaaaacagaaagaaagaaagaaaagaaaaagacgcagctgggcacggtagctcacgcttgtaatcccagcaccttcagaggccgaggtgggtggatcacctgaggtcaggagttcgagaccagcctggcgaacagggttgaaaccccgtctttactaaaaatacaaaaattagttgggagcggtggcatgtgcttgtaacccagctactcgggaggctgaggtaggagaattgcttgaacccaggaggcggaggttgcagtgagccgagattacaccactgccctccagcctgggagacagagtgaggctccatctcaaaaaaaaaaaaaagaaaagaaagaaaaagaggcagggcaccctggatgggaggaaggagcaccaccaagacaagcctaaatgtggatattttcattccaaaagcacaagaacttcaacctggctgaccccacaagcccatatatctcctccctgccttgaactcaccaagccccctgcttggaataccagtaggcagtctgagggaatgggacaatgtggtgcaggcagggtcgggacgacaccaggagtgtgaggacaggcccggcagagtgctctgagatcagactgaaggcgggagaaatgagagaagcaagacttcccggtcagaggagagaaagctgactagatgggctttgcaggtccttggggagagcagagccacgtgtggcttttagatgccactgttctccagatctttgcagaatccactaaactaggaaccttggcctgcagccagtgggagaagggtagtcactgggaagaaactcccaaaagtctgaccgaggcaatgctaggctggtgagagggtgggagtgggactatcttccctggagctgattaaggcataaggagactgcacagcctcaggactatatgctgaaatgcaggcatcacgtcagtgtagtggctgagagatacaaggaggaagaggtggaaatccaggaaaacagacagagatgaaaggactataacacacacagcaggtttctatgtaaatatgtgcttgtgatagggaccagatgactaacgacaaccttttttttctttttcttttttttttttttgaatcggagtcttgctctgtcgcccagcctggcatgcagtggcacgatctcggctcactgcaacctccacctcccgggttcaagtgattctcctgcctcagcctcccaagtagctgggattacaggcacctgccaccacgcccagctaatttttgcagttttggtagagatggtgtttccctcatgttggccaggctggtctcgaactcctgacctcaggtgatccacccacttctgcctcccaaagtgctggaattacagccgtgaaccaccgcacccagcctaacgacaaccttcccacacactcaagcccccacctctgcctctcctaaggagaagggacatttgattgctggaatggctggagctgtggaaggaggatgaagtattgggtggctgcagtgagccatgatcaagccactgcgctccagcctgggtgacagagcgaggccccgtctcaaaaaggtgtagggtggatgggaaagtatgtaaagaaaaagagagtgagcagggaccagagaggcagaggcaaggcttggctttgttctgtttcaagacatagagaagagatatttgggagcatctgtcatattgaatgagactttggggacacaagtggagtaatgactattttagggagttttcctaagtgtggaatggtctagtctcattcaccatcagcccctcaaggaaacgttcagtaaagatggaattggccgggcgcagtggctcatcctgtaatcccagcactttgggaggccgaggcgggcggatcatgaggtcaggagatcaagaccctcctggccaacatggcgaaaccccgtctctaataaaaatacaaaactagccaggcatggtggtgcatgcctgtaatcccagctactcgggaggctgaggcagagaactgtttgaacccgggaggtggaagttgcagtgagctgagattgcaccgctgcactccagcctggaggacagagcgagactccttctcaaaaaaaaaaaagatggaatttactcttcacagcattcagggttgcgtttctttttccatgagtggtactaagaagagcctcaaggtgggagcaggaaggctctgctgtgtcaggttatacctgcacatatgcatggccacatggcccaacactgtaagggccttgcttgtaagtcccttattctgtcctctagcaatgtgaccatgtaggcaacatttgaaattcctttaaaattccttctaggcagagatttaagctaagaggaggacctgagtgacctctggtgcaacatctgaaagcccacgacaagcctcctgggcttttccatgaatatcgccgtgcccctgcctacggatatgctgatgtgtgtatacaatattctgtgagaagcagagacgctgaacactaaacaacacaaacccatttggtctaactccatctctgcctactcagacatctgcttctagcggtatcagagttatgtctatgtagctaaaacaaatggagtaaggcagcaatacacacaggctgacaagcccaggatggagggcggcactgcagatgctctgctctctactggaatgtgtggacatacaggaatccctatcccaggacacccgcagacccccaccatgaatccgagatgctccccaatgacggtgatgatgacagaacagagatgccatccctggtcacacacacacacacacacacacacacactcccactgcctccctctgcacccctcccaaaggcacctgccttcctctcctctcaatccacaagccaacctccagctgccacctctctatcagccttggctacccccacccacgctggcacctgcctggcagctccctatccaccccctcagccctcaggaggccagggcacacgtggaacaggttgatgttgttctccaggaagtggagtgggaggggggtggggtcactagggcaggcggggtccccggaagcctctgtccctgcataaagcagcctgtcctggcaagggatggtcatcctctcaacctacagacccagtgagccctaggccctcaccccagacccagctgctggataggacccagccccgctcccaggtaagaacttgatgacagcagggaaggcaggggtgctctgaggacacaggaagatgggtggaccaagaagggaatggaactcccctagagtccagtgggataagtatcccgataggccttggggagggaagggagaggcaggcctgtggacatctctctggtgaagaggaggctgctgttgcccaagcccttcccaggtgcacccaggtagcaccaggaggttgtcctgccccatcctggccctcccaggaatgagggtgaaaaaaaaaaagcaccttgaagctggcagaacagccccacgcatctgtgccgtgcttcctgccccccctgctgctgtgaagtgcctgtggtggatgtgggatgcttccaagccagctggtgtggcctcttccacccacggggataactggggtgtgccgatcggccacccagccagagcacctggactcaaacttcaaagacagagacttaagatgttgaccctcaggtcaggtgcggtggctcacacctgtaatcccagcactttgggagggtgagatgggcggatcacctgaggtcaggagttcaagaccagcctggccaacatggtgaaacaccgtctctactaaaaacacaaaaattagctgggcatggtggcaggcgcctgtaatcccagctacctgggagactgaggcaggagaatcacttgaacccaggagatggaggttgcagtgagccgagatcatgccattgcactccagcctgggcaacaagaatgaaactccatctcaaaaagaaaaaaaaaatgttgcctctcaggttcccatgggccccacattctccagggccctctcatcctagcgcacatctctcagggccacattcattggttctttccacacacatttgccaagctcgaactctgtgccaggtgtggtacttgctgctgcagaggtgactaagacccatttcctgccctctgggaagtcacagacgagttgctgatagggtcaggtgaacagatcataacaaaggaaggtgcatcagaagagcgctttggaaacacagatacagtcaccagctgcctggaggactgagggaagaggttccaggaggtgacctgaattgagcattagcggaggactagggagtcttcagatccggaagcgggtattgtaagcagagggggcaaaggtgaagagcatcaaaatgcctggatcctggctgggcacagaggctcacacctgtaatcacagtactttgggaggtcaaggagggcggatcatttgaggtcaggagttcgagaccagcctgaccaacatggtgaaaccctgtctccattaaaaatacaaaaattagccaggcgtggtggcacacacctgcagtcccagctactcgggaggctgaggcaggagaatcgcttgaatctgagaggtggagactgcagggagccgagatggcaccactgcactccaccctgggcaacagagtaagactccatctcaaaaagaaaaaaaaaagtctggatccaggcatcccccaggggctgtgagaggggagtgggtgtactcatacctgtggcacgcatgagggaaggacagggtgcagggaagtgtaacccacacatggaaagggcaactggggcaggtgaacagcttggccacccaggctcttgttgccagcagcatctccttccctcccctggtgtcctccgactctggctattgctagtctctggtgtgagagaaagctttacttccattgctaaataaatgctctagaccaggcgcagtggctcacacctgtaatcccagcacttcgggaggctgaggtgggaggatcacttgagccaggagtttgagaccagcctgggaaacatagtgagactctgtctctacaaaaaaaatttaaaaattagccaagtgcatgactgcagtcccagctactcaggaggctgaagtgggaggatcaattaagccttggcggtcaaggctgcagtgagctgtgatcacgccactgcactccaacctgggcaacagagtaagaccctgtctcggaagaaaagagaagaaagcaaagcaaggaaaggcgaggtggagggaaggaaggaagggaaggaaggaaggaagggagagggggaagaaagaaagaggaaagaaagaaagaaggaaggaaggaagaaagggagggagggagagaaagaaagaaggaaggaaggaaggaaagaaagaaagaaagagaaataaataaagaaagaaagaaagaaagaaaaagaaaagaaagaaaagaagtgctccagctgggctccgtggcagtgaagaaaatgagcgtggagtgagaaaaatgcccttgacaaagaaaagggaggtgtggctttgctggccatctgtgggactttggggcaactctttcaactctccagccctaggttcctcatcataaaatgcagactcccttgattctttccagctgtgacatgagacaatccaggcatctctaagagctcctcctgcctcagagccgggtaaactctctctgcaggggcccagcctatatcccgggctccttggcagccttggcagccaccttgacactctcctgtctccccacctccacagagacaatgaccatgtttgaaaatgtcacccgggccctggccagacagctaaaccctcgaggggacctgacaccacttgacagcctcatcgacttcaagcgcttccatcccttctgcctggtgctgaggaagaggaagagcacgctcttctggggggcccggtacgtccgcaccgactacacgctgctggatgtgcttgagcccggcagctcaccttcaggtcagcctcaagcggggctgggaactgagggatactgagggacaggggctgggcacctggcctgcaaggaggacctcaaagctccctctggccagaggtgattagatgtcatctagcccaaagtcatcatcaggagctgaggaggctggtggtcggggggatacctctcagctcagcctcttttatttatttacttgtttgtttttgtagagatgggttcttgctttgttgcccaggctggtttcaaactcctgggctcaagcaatccttccaccttggcctcccaaaatgctgggattacaggcatgagttactgcacccagccagcccagccccttttgtcttttccctcctgcagacccaacagacactgggaattttggctttaagaatatgctggacacccgagtggagggagatgtggatgtaccaaagacggtgaaggtgaagggaacggcagggctctcgcagaacagcactctggaggtccagacactcagtgtggctcccaaggccctggagaccgtgcaggagaggtgagagtgggcgggactgagggtctcccgggatgtgggtggggcagtgcatggaaatggtgcttggggccttgagctgaaaggtaggacccttgcactgacctttgccaatgtggtcatgacaggggagctcttggaggcaacccttctggcccatggctgcatccaggccatttcctagtcacacctcccgctgctgccaccgtctccaggaccacctccccactgtcacgcatgcacagggaagatgatgtccacactagcttgctgtgtgatcttggaaaagtcacttctcttgggacctcagttttcttttctgcaaaatgacaggattgaatgatcatctctaaggctccttctaactctaagactatgcaatacactagaaaaaggagggatgtgtcttaactgcccccagctgagacctgagcactgtgttctgctcccataaatgaagcctcctgcctgaccccaatacacactaagcacgccctcgggaatgctgccccacagcacaaagggtgtggcaggtgccacattgatgctgggcaccaccggatgtttggcttgacacgggaactgacttttaagtagttaagtagtggttgaaagaaggaggtaaggactgtgaaggccagaaggaaaggctggggtagtcatccagcaagcatgtatatagtaaagcactctactacgggctggggtgcgcctagaacatctttgtccaagaaccttgcagtctaggaaggtgaaaattttaaaaacctgtgcaacagtaattataatcaaagccaagaagtgctaagtgctgtagggatggtttgactgagtcttgtggcaggtcaaagggacttctggctggggaaataagggaagatctcacagacatggcagcctctgttttgggccttgaaagatgagcagaaattgggcatgcagggctgggagaagggtattatgaaggcacacaggtgagcaatctcaaaaccaccaagggccaggaacagccagcatagcaggggcggaagaggtgcgagtagaacgagcaggaaatgcaggtgaacccaaaccatggaagaggcaagtggcagctccaggagactgaattgtaggcaccaggaagatcctgaaaatgttctgatgtgtcccatgactaatccagccagatggaggaagtgtgtcagataggggaagaggaacaggggtttgaagcagtcagacaaggcaagacacttttcttctttttttgtttgaaacagtttttcgctcttgttgcccaggctggagtgcagtggtgcaatcttggctcaccgcaacctccgcctcccaggttcaagcaattctcctgcctcagcctcacgagtagctgggtttacaggtgcccgccactacgcccggataattttttatttatttattttatttatttatttattttgagatggagtctcgctctgtcgcccaggctggagtgcagtggcacgatctcagctcactgcaaactccgcctcctgggttcaagcaattatccagcctcagcctctcaagtagctgggactacaggtgtctgtcaccacacccagctaattttttatatttttagtagagacggagtttcaccatattggctaggctgatctcgaactcctgactttgtgatctgtccgcctcggcctcccaaagttctgggattacagggaagtaatcccagttaagtagtggttgaaagaaggaggtaaggtggctcgtgagccaccacacccggctaatttttgtattattagtagagatggggtttcaccatgttagtcaggctggtcttgtactcctgacctgaggtgatccgcctgcctcagcccccaaaagtgctgggattacaggcgtgagccactgagcccggtcttttttttttttttttttttttttttgagacggagtctctctctgttgcacaggctggagtgcagtgacacgataccaggtcactgcaacctccgcttcccaggttcaagcagtcctcctgcctcagcctcctgagtagctgggattgcaggcgcacgccactacatccagctaatttttgtatttttggaagagatggggttttaccatgttggccaggctggtctcgaactcctgacctcaggtgatccgcctacctcggcctcccaaagtgctgggattacaggcgtgagccaccacccccagccaagacactgttcttctatcccatgagcaacgaaaactgaggacccgagctggggaagggcaagaggagtgaagagggaggaatggatgcaatgcccattgccaacggtgatagaatggcctgggcttggtagctgattgcaggatgagggaaagggttttgtcaaaggtgactgcgagattttacccaggttgtgacattataggacattaaagctaccattacaggtgacaaacaggaagacacaggttagaggtagatttggagattgtgagttccttttggatgttttgagtttctggttctgctgagacatcagctgagcatgttgaacaggtgattggaaataagggcctggagctcaggaaagaggtcaaagtgaagatacacacaaggtaatcagcactataaagattaaaactgtaggagccaggggaggagtctcactcccgtaagcccagcactttgggaagccaaggcaggattgcttgagcccaggagttcaaaccagcctgggcaagagagtgaaacccccatctccacaaaaaacgcaatattagccgggcatggtggtgcgcctagagtcccagctactcaggaggttgaggcaaggggatcacttaagcccaagagctcaagtctgcagtgagttatgatcgagccactgcacttcagcctgggcaacagagtgggaccttaaaaaaaaaaaaaaagaaaaaactataggagtgagttgggtgtggggagcttttagagggagttgagaaaacaggactgagaacagaatcttacagaacataaaattttagagaaccaaagaaactggaaaatgaggtgcagacagaatggataagatttaggaactagaagtactggagttgagccagggtggtacactgtgactggaagccaagagaagccagcgttgcacggagggtttccacagcaggatcgagtattgcacagagttaggcgaggtcattgagactgacaggtaagagatcattgtaatttcagctgagtagtggaaatacaaggcaaattataaagaatttaggtggaccgggcatggtggctcacatctgtaatcccagctattcaggaggctgagggagaagaatcgcttgaacccgggaggcagaggttgtagtgagccaagatcgtgccactgcactccagcctgggtgacagagtgagtgagactccgtctcaaaaaaaaaaagaatttttttgatatatttgccaatgaaatgaaggaaaaaatagggtagtaatttgagggagtggcatgatcaaagcaaacaaatttgttaggattagggagtttatatatggaagcagacagaaggagcaagtggagaggaggaactggtgttaacagcaagagagagcataagatgtggagagaaaggatcccagagagatgaatggggaggaaagagggggggagcatctacccccgggatcccagagagatgaatggggaggaaagagggggggagcatctacccccgaactggaggaaaagggggtaagaagcacccaagaggccctgttcctggccaggtgctggcccaattaccgagtttatctctgagcaacccaggaggtcagcatcattatactcatttcatagatgaggcaattaagactcagagaagctgccctgccagtaagcatgagatctgggtttcaacctcagccctagtccagagtcctcactccttccctgccaccacaatgtctagttcctgggaatgacagaaggaaagaggagggtgtggtacaggcaggaaggagctctgaacggttcccttatgtttctcctgcaacaggaagctggcagcagaccacccattcctgaaggagatgcaagatcaaggggagaacctgtatgtggtgatggaggtggtggagacggtgcaggaggtcacactggagcgagccggcaaggcagaggcctgcttctccctccccttcttcgccccattggggctacaggtttgattcaaacacacacacacacacacacacacactctcacactcacactcacacatacacatttacattcagcccctccttggaggcttcattagctttgcctgatcagcgcccaccgaggatgctgaaaagggccactccttcccccggctcttaaagatccaaaccccagacatatgccccctccctggtcagtggcacccagtgagggcagatccctgcgccagatgccacagggaactactggggaaggggaaagtcacattcctgggttttccctcgtggtgctcccattccaaagaggagacatctttactctcggaaagtcatcaggttcatagaggagacacagaggctaaagcccagagaacacaggcttggaaaagccaatggaaataaggaatggtctccatacctctatctattgcatctaaatattcaagggatgatttgggatttggagccaggagtaggggttagtcatggaaggcgtcctgaaagaggtaagcatgggacagatggtgaagaggaagaaggagccagggcttggatggaagctctagggtgatgtacaggcaggagatggagcaggtctgcccagttcccttcatgcatctgaaccaggaactagaactgacctgactagactctactgacctgaaccaggtcactagagggaaaatcagcagaaatgagcacaaggactttgaagtccttcctcagagtccagaccagggacaccactgaaggcttccagcttcttatctccctgaaggctctcagccctgaccctgcacctcccccaactcacgctcccaatatctcatacttaagatgtccagagattcacaaattctcattgtctaattctagggatccataaatcacaaggaggctgtaaccatccccaagggctgcgtcctggcctttcgagtgagacagctgatggtcaaaggcaaagatgagtggggtgagcagagacccgcatgttctccccacaagatgagaattacctgcaccagtactgaggcaccctggtcccctcttgcggaaatgtcagagaatgagtaggggggtgtattgtactgtgatccgactgcagccatggagcctgctctggagagaagggtgaagaggctcctggattctgagcatcttctgggtgctgggcactgtggttattgggggagggggtacaaatatgaacatgcactgcctctgctctcaagaagtctgtggccaaaggaggaaacagacagagactggaatggatgatagaaagtagtgttctcatagtagagaatttatcaaggaagaaaagattgcttccagcaatggaggttgaagctgggaattaaatgaagcatttggggtgcaaggtcctagcccttagcagagccctttggcttgagactgaagaagggaatgtggggcagctgctaagtgtcctcccaccctccctcccttgcccttcacagatattccacatatctgcaatgataacatgcaaaccttccctcctggaggtaagtgaaattgcttacgggcttcccacatcttccgccctacccctgacattatctgccaaaatcctccaccctctcctagcttatactataatcccccaaggagcctctgcttttgtttcccaagtccctaagaatacctagcctcaactttagaaagacagatagaggcatataaatactgtcccagagagatatagaaactgacagacagagaccggaaggcacagtcagaagcagaagtaagacttggagactgagtgtgttcccgaatcatgggggtggatgagctagcataatctccctgtgtttttataatgatcactgatgaaactgccttgaagactgttttagatgaaaaggcaaaaatgggttttgtgctgacagatgtgcattttttctgtcttcagaaaagtcaggagaggagaaggtcatccgtaagtgtttcctttcattccactgaaactttcttgactccaaattttaaaactccagtctttttctttccttctgacaggactgacagggaaatagcagagcgaatctcagcaaataattgtccccgaaacatggcagaaattccaatagcttgggaaaaagcagtggaaaggggggagtctttgcccaggtggtctgacgcctgagacctttgtcctcaacagccttactagcagccaggcacagtgattcacacctataatcccagcactttgggaggctgaggcaggaggatcccttgagctcaggagttcaagaccagcctgggcaacatagtgagacaatgtctctatttaaaaaaaaaaatttttttttggatggagtttcactcttgttgcccaggctggagtgtagtggcgcaatctcagtccactgcaacctccacctccccggttcaagtgattctcctgcctcagcctccggagtagctgggattacaggcacccgccaccatgccctgctaattttttgtatttttagtagagatggggtttcaccatgttggtcaggcaggtcttgaactcctgacctcaggtgatccacccacctcagcctcccaaagtattgggattacaggcgtgagccacggcgcctggccttttttttttttcttgagacagagtctcattctgttgcccagactggagtgcaaaggtgagatctccactcactgcaaactctgcctcccaggttcaagcaattcttgtgcctcagcctcctgagtagctaggataacaggcgcgggccaccacactcggcgaatttttagtatagatggggtttcaccatgttggccaggctggtctcaaactcctgacctcaggtgatcctcccaccttggcctcccaaagtgctgggatcacaggtgtgagccactgagcctggcctagaaaaaaaaaaaaaaaattaagagtcttagtagctataacctgctacacacacatctgcaactcggccgcccagcaactggggccagagccactgagtcacagtaatgccaggaacaaggtagctgggctctcccaggagacaggcaggatgtatttcctcatcttccttagtgtctcaacccctgggtatggctgccattctgaaggattgcattcttatcttttttttttcctttttttctcagttatccaggcatctgatgttggtaaggaactttgtgagtttctcccaagactttggcatggaggtagcattaggggcagagagaggagaaggcgaagtcattctttgtcagctaactcatgggaagggaaaacagactttctttctccactttttgctggagtctcaaagaaaagtcaagtgtgtactgatatgggataaggcctgggatctcaggaagattaactgttgggttagatgatacatgcatcctggcccaccttctcgccccaaccctcaggttagggttggtggatagttctgtcaccgcattccttggtaaagaaaaatggggccaggctcaaactggggggtagagcatgggtacctaaagggggctgagtgtaggagccctgcagggggaatgctgactggagaggaaggtgcccgatggagggctgtgtgtcccattattgtccccataggggacgtacacgaaggcttcaggacactaaaagaagaagttcagagagagacccaacaagtggagaagctgagccgagtagggcaaagctccctgctcagctccctcagcaaacttctagggaagaaaaaggagctacaagaccttgagctcgcagtgaggacctagtggaagtggggaagggtgggagaaggcatgttttggtgaagatttggtgggggcgggtattgcagcaggtagggagatctgacgggggcaggaggtgggtggccaggggagtccaccttagataccttccccaaggctggccacgtgccccaaggctgccaggccactgctcctccctttgtcccctggaaaagggcaaacagtgggttcccccaaggcacatgctccctctgatggccagaagggacttctgctggaggggctggaaccttctctttccagagtccaaaactcaggaaacaaggaacccaggagtccagtactcttcaggacatgaggcctcgaaaaagaaatcaggaaatggagagagtttccgcatgtcaaggggttattatgtgctgggccctgggttgggccctttcctatgttatcttcaatagtcgcccaccttcccccacagcttgaaggggctctagacaagggacatgaagtgaccctggaggcactcccaaaagatgtcctgctatcaaaggaggccgtgggcgccatcctctatttcgttggagccctaacaggtaagtggggaataaggtcttcatttatagaccttttcagtaataggaatgaatcacttgaatcaattcccaaatggatgaataaatgaatgaatgacaaattataccacagttaagtagtttatatctacatttttataaattggtttcatggctggctgcagtggctcatgcctgtaatcccagcactttgggaggccaaggtggatggatcacccgtgatcaagagttcgagatcagcctggccaacatggtgaaaccccgcctcttccaaaaatagaaaaattagccgggcgtggtggcaggtgcctgtaatcccagctactctgaaggctaaggcaggagaatcgcttgaacccaggagggggagggtgcagtgagccgagatcactccattgcactccagcctgggcaacagagcgagactccatcaaaaaaaaaaaaaattggtttcattcctaaggatttgcttggtcacattgggtagtctgagaagacagcctagtcttgctaatagaggttgaataaccctagttttatcagcaacatatttaaaatttctgcatatagctaagctcatcacttctatcctgatacctgttagctttaacttcagggagtaacattttcttatcttgcccctaagagctcttcttccctccacattttctagttttccacttagaaaaactctgtggtccttcaggtgtaagccaaaacgtttgttcccttaggaagcctgccctccgactccaagaccaaagtggacccctcagctatggctcccttaacacctgcgttgtaattacatccaatgaatgaaggctgaaattctggaagtgcgctatttggaggctgtagtcccctctgcaccagcaacacacatctttctctgctttttttctccagagctaagtgaagcccaacagaagctgctggtgaaatccatggagaaaaagatcctacccgtgcagctaaagctggtgagggaaaaacagcagatgctggggagagtctgggagtagctgcagccagtggagatgcagatttcgcctaaggatggagccattctggaggatccctgtcttatcccaggggcttatgcccactcctcctttctctctctatttctcattttttgttatttcacaagaggtagaagactgaatttctgggcaataatctgggtttattagcctgatcttgggagaagagacagaaactgtggctttgcttattcctagccaaatattgtaagcaaatttttttttttttttttttgagatagagtttcactctttttgcccaggctggagtgcaatggtgcgatcttggctcaccacaacctccgcctcccgggttcaagcgattctcctgcctcagcctcccgagtagctgggattacaggcgcccaccaccacaccctgctaattttgtatttttagtagagacagggtttcaccatgttggccaggctggtctcaaactcctgacctcaggtgatctgcccacctcagcctcccaaagtgctgggattacaggtgtgagccacctcgcctggcctgtgagcaaattttttactgtgtctgagtctgtctcaatttattcctctgtaaaatggggctaaaaatcaatgtgctgcccactgtatagggctgttcaaagacccagatggggttgtaatgtaaggtaaagtaaggaattctaataaggggaatgtaaccttcttgtgatttttgtgagttaggagaggagagaggtttccagttctttcttttcatgctgttttgattccctccaggtggagagcacgatggaacagaacttcctgctggataaagagggtgttttccccctgcaacctgagctgctctcctcccttggggacgaggagctgaccctcacggaggctctagtcgggctgagtggcctggaagtgcagagatcgggcccccaatatatgtgggacccagacaccctccctcgcctctgtgctctttatgcaggcctctctctccttcagcagcttaccaaggcctcctaatttgccttttacgtctgcttcatgactccctaatgccttcccaacctcgtggtgctgtgtccttaccacctaagggcatttcagagccatcagctgaagacatctgaaatctcagctggtcacccatgataaccaacttccacctgcccaaccatatatcaccccctacccctccagctccgcaacccactaagcccatctgctgatgcttaaattttctttacttttcttttctttttttttttttttttgagatggaggctcactctgtcacccaggctggagtgcagtggcttgatcttggctcactgcaacctccgcctcccaggttcaagcaattctcctgcctcagcctctcgagcagctggaattacaggcacgtgccacgacacccagctaatttttgtatttttagtagagacggggtttcaccatgttgcccaggttggtctcgaactcctggcctcaagtgatctgcccgcctcggcctcccaaagtgctgggattacaggcgtgagccaccgtgcccggcctgtgcttaaatattctaggagtagaagcactcagacttttaaaactatgagccgtttcagcaaaactgagaaaaaaagaagattaattaatttcctatcctaatccctcctacttatacttccccaaaaaacaagctttactggaattaatggaaaatattatgtcaatcttaggaatgatatgtcttttggtgtttttctttaaagaatttatcatacagaaattcttaatttgtgccagaaaaagaaattgttatcatactgcatataaatcatatgtacatgaatatgatgctgtactgtcctcaggcaaactggaaaatgctcagagggtatagaatgtggaatccagatttttttttctgttcaattagttttctttaatggaatctagagtctcaagtgagaagatatcaaagcagtttgtcttcaaagaagagcatttgggagtcccctagctctgggttgagggaaagaccgagagatatatagtagaagcccgaaacaaaaataagacagatttcaaatttattgaacagaaaatgcagatgggcctttaaaaaaaagggggacccaagaataagactaacccaaaactttaaaaactaaattgtgatattatttcacctttctctgttctgccctgaaatttagggttcttgtaggaggaagtagtgtgggtaggcttggcatattactactaatatggatattacaatctcatcaaaccgctgggtttatatcatcctcctctgcctaaaagctgggtttgaacatctttcaccaacctcttttaaagcagtatcaggaccggacaccgtagctcacgcctgtaatcccagcactttgggaggctaatgtgggcagatcgcttgaatccaggagttcaagaccagcctgggcaacagggcgaaaccctatctctacaaaatataccaaaaattagccaggcatggtggcatgtgtctgtggtcccagctactcgggaggctgaggttagaggatcacttgagcctgggaggctgaggctgcagttagccaagatagcaccactgcactccagcttgggtgatggagcgagatcctgtctcaaaaaataaaaataatttttaaaaaagtagttctatgagtgcagtacatgtctgtaatcccagcactttgcaaggccgaggcaggaggatcacctgaggtcaggagttcaagaccagcctaatcaacatagtgaagccctgtctctactaaaaattaaaaaaaaaaaaattaaaaattagctggacatggtggctcgcacctgtagtcccagctactcaggagaaggaggcaggagaatcgcttgaaccccagagggggaggttgcagtgagccaagatcacgacactgtactccctagcctggccaacagaacgagattccgtttaaaaaaaaaaaaaagttttatgagtggaagaatttctctaaggattttggtccgtggagtcagactctcccccagtgtcttagtcaccccctgcccagcctggttccctcatccaccaagaattcatgaccaactgccagaagctttgtgttatgccgccagcctccctgatcctgagcaccttccaaagcctcactctattgctcatggatatactgggttgttatctgctgacttggttgttttctccttgtgatgtaaacttaatagagagatgagctaacaccctaactatctagaagagtaactcctttgattgttaaggatgaacataactcatctgttttcttccttaccattctcgcccaccttcagttgcagatatggtgttatgaagaggttctaatgagtttattccaatgatgattcaaaagtcctgttatccaccccccagccctggagggtgagaggacagttgaggaggaactggtcaaggcatgttccctaaaactagagcacatatctttccagttagcgagtggctgtttaacgcaaggaacatcctgcaatcctatgaaagaggatgcaaaagatatgcaggataccctttatatatgcaaaggaggaggtcaaaacatatttcctgccttctaggtccttacaacagggctagattgtcttgtagggtccgtgaaaggtctaaaactcaggacttccacttatgggagagagaaaagtttcaaggtagggagagagtttttgttgtgtgttctaagaaattgggagctatatccttcaccttgtttcaccttccctgcagaaccagtggggcagtcctttgaaaaataagtgggtagggtttcttgtccaatttgcttccccttaggtacaccactaagtaaaccatcattctctccttaggcacaccattattctgttccccatttcacaatgtctgtctggatgtataaaagccctctcaatgggctccctaaagcgtctgccagtaggggctcccaccctctttcctcaacactcccaatccaccgcagcccagagcacagtgtctgcttatctaaccatctgactcccccgtatactacattcttgagctgtttttcacccccctatttgctaaccgtgggccgtacatagggtggacccctatattttgttaaactggagtgattctacgcaaatgcacgctcctacctatcggcactcccagcctgcagaaattgtatgccttatgttcagcactaaactcaaatctaaccaaggaagtccggatcccatagggttcttcctactctccagttcggtttattttaaggccaacagccctagcttcacgtccctccttcacagccttctttccttccctcctgccggatgcgcccggcagccgttgagcacaagcccagcggatctggaaggagaccccgccgcgaccggggaaaattgagcgaacttgggcgcaaaacccgcccggcaactcgtgacgtcatctcgtcccgcgctcggataggctgtacccactccacgctggttgaggcgctcttaaagtcctttgtaacccagattggagcctgaggggacctctcgtggacgcccacagaaatgcactcgagaggaacataaaagcatcacacttaagcgctcgaaagaaagccccacgaacccataaaggctcctccccgctccttcctcgaagctcctccttcatcctgcacctcggctgtggatttatttcccctttgttgactcggccatcggcctgccgggcctggcgtttcccagaaggcccagcgccgggaaggggtttgcagctgctccgtcatcgtgcggcccgacgctatctcgcgctcgtgtgcaggcccggctcggctcctggtccccggtgcgagggttaacgcgaggccccggcctcggtccccggactaggccgtgaccccgggtgccatgaagcaggagggctcggcgcggcgccgcggcgcggacaaggcgaaaccgccgcccggcggaggagaacaagaacccccaccgccgccggccccccaggatgtggagatgaaagaggaggcagcgacgggtggcgggtcgacgggggaggcagacggcaagacggcggcggcagcggctgagcactcccagcgagagctggacacagtcaccttggagggtacggcagcccaggccgggaacgtgccgcgatcgcgggtgacagcgacccctgtgatttggcttcttgctgggaagccacagcagcctccaccaccctcagttctttgggatcacccccagatacctgctcccactgccccgacactcccgactccaggcccaatgactgaaccttctctccaggctgggaaccactcccctcccatcccctccatccccatatctggggttgcatctatatctaggtcccagtgggcctggggactccctcttttaagtcctcccctctgacctattccgtttatatcccacccgactgattttagcgcctccaatatatgactgattgttcccgctggaaaccagtgtttgtgtctgtgtgtaaacagggccaggatgacctagaatattgactcctgagttttaaaactgtacagcagatttttgttgtcctagctgcctttagcacactcccccgaatgaaccatttcgacctagtatcttgtttcctacttctctaactgaagtgtcccaacagtccccttgctgtctcctcccttcaggtccttactgcccctctgtttctaaagggtttaagtacatacacacttaaaacttttcgggtgtcatctttgtttggttttgtaatactcaacctttggcctaaactcctatataccggtgtctcctatttcttttctccgaggttcctgtttcgagtgtctgtagtcctcttgttcctccaagttcatgttttacttttcccacttacagcgtcctgtttccatttgaagtgggcaaagtgagagcttcccactgtgatcctggtgccattttcctggttctggatcaagtgggaccagactacttactaggttttcttttcactaaaatgcgtgagaaactagctcaaaaacattgagataagcaaagttatcctcctaggtggtgcttttgaggatgtgatggtgttgactacatcagctcttactgtaaagttgagcaacaggatcgatatttaatagagatccttttacctaaagtagtggcagcaatgtcaaaggtgccactcagcattgcctactgggtgtgtttattacaggcacttcattttcttcttgtaaagtaattcatattcattgcagaaattgtggaatgtatgagaagttaaaagcaggggataaaaaacatggttaacattttttcttgtgaatttttgagctgttctcctataattgagagcaagttatgtatacagtttgtatcaaggcataactaaatataaattttgaattttatgtgttttcattaacattcgtaaacataatcagcattcaatttattccagaaacatttattgaatacccaatataatggttaagagtacaagttctggaattagttccctcatctgtataaatacaagtaatagtacagtactttattgggttgttgtgaacattaaaatgcttaaaactgtgcctagcacataaatatcagctgttattatttatatcattagtgtggcccagataccctgtgctaatcggtgaatatacagaagtgcctaagaaactactcattgattgcattcccttattgctttgcatttaaactgtttctagtttcttgctatcataaatagctttgaagcaatcatctttgtgcccaacttaaaaaatctacttttctaattatttcttcagtacagattcccaccaaaacctatatgcctgagtttaaaaggctgaacattttaaaggtttttgatagttattgtccagaaaaactgtgctgatttacattataccaggagaaatgtagttttcactgtactctataatttttttttttttttgagacggagtctcgctctgttgcccaggctggagtgcaatggcgcgatctcggctcactgcaacctctgcctcccaagttcaagcgattctcctgcctcagcttcccgagtagctgggattacggtcacccaccaccacgcccggctaatttttttatttttagtagagactgggtttcaccatgttggccaggctggtctccaactgctacccttaatgatccgccctcctcagcctcccaaagtactgggattacaggcgtgagccactgtgccccacctataatttttttaatgttacaaatttggtagtttaaaaatgtttccatttgcaattactcaaatactaatggaatataatttttgtctgttagctatttttcctctttgtatgttagttcgtctccatttttgttttgaaattgtggcaatataatcattataccattatatctcttaaccatttatacaagctctttatagaataaaaatatgaatctttgatcacatttgttgaaaatatttttcttttgtatacacagttatctaaaagggtttttttaaatgaagtcaagcccattaatcttttgtgcgtatgtgatttctcccattgttcacatttagaaagtcttttccattaagatctgataaatctggactccaggtttctgtagttaattggtttttcttttcttcctctgtcatcctctaccccatcctgcacccccactgtatgtttttcttgccacttggttatgtcttaaaatcagtgtgtggaatctgtaaatattatggaccccattagggcagaaaaggtgagtggtcgcattttgcccctctgtgagaggctccttagaactccttgcctggccggcacggtggctcacgcctataatcccagcactttgggaggccaaggcgggcagatcacgaggtcaggagatcgagaccatcctggctaacacggtgaaaccccgtctctactaaaaatacaaaaaatttagccaggcgtggtggcgggtgcctgtagtcccagctactcgggaggctgaggcaggagaatggtgtgaacccagcaggcagagcttgcagtgagccgagatcacaccactgcactccggcctgggcgacagagtgagactccgtctcaaaaaaaaaaaaaaaaaaaaaaagaactccttgcctggagtggtgggggactaggagtgaaagtgacatcattttcttctctgctcttcttcagacatcaaggagcacgtgaaacagctagagaaagcggtttcaggcaaggagccgagattcgtgctgcgggccctgcggatgctgccttccacatcacgccgcctcaaccactatgttctgtataaggctgtgcagggcttcttcacttcaaataatgccactcgagactttttgctccccttcctggaagaggtgagtgagtcaggccaacttaaagggtgcaggcctggcctcagatccccaggaacagcattgttttccatcctaaagtcccatcttattacctgtggtagcatgaggagagaagccaaagcagtccatttgaatactcatctgcacagtgacaagggaaccgtccactgccctgtagtgtcattcttcaaagtcaggggatcaggaccctcccagccaaactcatttcccactaccctgcaacctgtaccccctactccagttgaggttgcgttgggtgacctctctgttgttctaggagagagaaggtgctgctgcctctttcttctgaagcttcaccatggaggaggtagagaacagtggttaggaggagcacagctgtcagggccaggcacagtggctcacacctgtcttcccagcactttgggaggctgaggcgggcacagtggctaacatcgtcatcccagcactttgggaggctgaggcgagcagatcgtttgagtccagcctggattcaaacaatctgcccgcccaggagtttgagaccagcctgggcgacatggtgagaccctgtctctgcaaaaagtacaaaaattagccaggcatggtggcacctgcctgtagtcccagctactcgggaggctgaggcaggaggatcacttgaatgcaggaggtggagattgcagtgaaccaagattgcaccactgcactctagcctaggtgacagggtgacccccctacctcaaaacaaaacaaaaaaaaccccacagattttagaggtagagttgaatttgaatccaaaccctgacagttagtacctgtgggacttgggcgagtgacttcattttgctgtgcctcgttttcttcatttgttaaacgtgatgaacggattgggaagcgggcagtataaagctcctagagcagtgcctggtacgtagtgaatgcagacgaagtcagtttggtggtggtggtggcgcctccgtgccaggagagacctctccttatcctctgtagctgtaaactctccctcatgattcatggcatgggccaggtctcagccttctccaattccactgaccttccagcacctgcatttccttaaaatcctgtatactcagtcagctccgtggatggggaaactcagaacatccctggaggcagggcagtgaagagtttcttgtctgggaaaggggaaaagcgtactgttcccccaactccaccttgaatattttctgaccttcacatcgctaaactcacgaaacgtgattattttgggggtgactgtaacacattattttttccagtgtcagtgacaacataggaaaatatgttttgtttatatgttgactttccctaaattttctttgttcccacaagaaaccattttttggtctcattattctgatttcatctctagaattatttcgttcagccctgtccagtagtatttgcagtggatccaggtgtggtggtttaatgtctccacttaggttgtagcctctttgaaggttccttacatcgtcctttgtctccattatgttgtgtaaagaaattttttgttctcctgtaacactttattgtgtttattaatattatattgccagcctccttgacttgttttgtttttttgagatggggtcttgctctgtcacccaggctgaagcacggtggcacacttatggcccagtgcaggctcagactcctggtatcaagcagtcctcctgcctcagcctcctgagtagctgggaatacaggtgcatgccaccatgcctggctagttcttttttattttttgagagatggggtctcactgtgttgcccagactggtctcaaattcctggcctcaagcattctcctgcctcagccttccaggtagctggcactaccggcgtgagccaccacacccagctcctccttgatttctttgggaaagactgtaatctttatttttttatccctagcacctaacaaaatcttggcacatggtagacactcaataaatatgttgaaatacatagtggatgctcaataaattcttggttacttgatcagactgagcttttccatggtaacttctgtcctctcctagcccatggacacagaggctgatttacagttccgtccccgcacgggaaaagctgcgtcgacacccctcctgcctgaagtggaagcctatctccaactcctcgtggtcatcttcatgatgaacagcaagcgctacaaagaggtatccaggatgcagtgagagcgattcataagccccaagtgatgcaaggggtttggcggggagatggtccctggtgaagaaatggaaataatcattgattcttaagaactgtcccccacactctttccccatagaggtatgcgtttgatcccacatcccaggagaacccactcttgctctgggcactgtgggacagggcttgcagtggtcatgctgtaccggtctgtgggggataccagcgtagtacattcttggggaaaagtaggggcatttggagacagaaagacctgggttccaatcccagccataccctaggcaaattaatttctcccagctatatgtaagatggggataatagtgcctaccttacaagatggttagcgttacataaaataatttgtttagaaatacttagcgcaatgatctgcatatagtaagctttcgtgatattttcataaatggtagctgttattatggactaatagctccatttgcaaactgcacttctaccactcccccagctagggccagcttctttgttcatcatagccactgtcacaggagcacactcaggaagtaagtcgcactccttaattccctggtttgtttcctttccttaccacactatttttggttgttgtttggttgggggtttttttgagattgggtcttgctttgttgcccatgctggagggcagtggtgtgatcacagttcacttgacctccccggcttaagtgatccttccacctcagcttcttgggtagctgggactacaggcatgtgccaccacgcccagctaatctttgcattttttttgtagagacaggatttcaccttcttgccaagctggtctccaacccctgggctcaagtgatttcctgggctcagcctcccaaagtgttagggttacaggcatgagccactgcgcctggcccactgttttgtttttactggagatggggtcttgctatgttaaccaagctggtcttgaactcctgggctcaggtagtcctcccgcctcagcctctcatgtagctgggattacaggcacgtgccactgtacttggctgtttgtttttgagatataattcacccctttaaagtgtactacaggccaggtatggtggctcacgcctgtaatcccagcaccttgggaggccaaggcaggcagatcatgaggtcagacaatcaagaccatcctggccaacatggtgaaaccctgtctttactaaaaatacaaaaaattagccgggcgtggtggtgtgtgcctgtagacccagctactcagaaggctgaggcaggggaattgcttgaaccagggaggcggaggttgtggtgagccgggattgtgccactgcactccagcctggtgacagagcgagactccgtcaaacaaataaataaagtatactacaattgagtgggttttagtatattcccaaagttgtatatccacccctaattccagaacattttcatcaccccacaaagaaacaccatacgtattagtagtcacttttcattttccccttacccagcccctggccgctactaatctgccctgtctctattgaggatttacttactctggacatttcatgtaaatggaattacacaccgtgtgcccttggtttctggcttttttcacttagcatcatgttttcaaggttgacccatgttgtagtgtgtgtcagtacttccttcctttttaaggctgagtaatattccctcgtgtggatgtgccacattttgtttatctgttcatcagctgacgggcacctgggttgtttctactctttggttatgaataatgcttctgtgaacattcgtgtacatgcttttatgtgagcctaagtttccagttctcttggcttgcatacctaggataggaattgctggctcaaatgacaactccatgtttatccttttgaggaactgccacttgattctcttttggcttcctccccaggcacagaagatctctgatgatctgatgcagaagatcagtactcagaaccgccgggccctagaccttgtagccgcaaagtgttactattatcacgcccgggtctatgagttcctggacaagctggatgtggtgcgcaggtacaggcagccaagcatctcacttggggtccgtggggtcagagacttggtcagtcacaagcacacagctgtggatctgcagagggcgaagaacctgtagatgtaagcagggaagaggggcagtggttcccatgccctgcgccacgtgaggggtgtgggagagagactggtgctagatgaagaagtgggtcactgctgggctgtaaagaactgtccccaggttcttcccttcaccccacatcaaggtaggactgagggtgggttaggggtggagggacaggctagaaaacattttacttctttgctcaaaacctgcagtggcttcccgtctcaaggaaagacaaagtccttacaatacctcataaggcctgacgtgatctgctccattttgacctcccagacttcacctcctcctgctcctcagccccactggcctgcctttcctctggtgtgcccggcacactcttcttcagagcctttgcactggctgcccctctgtccagaacactcttctctccgcctccttcaagccttcccttaactgatcccttctcagtgagtcctgccttggccaagctattgaaaagttcaactcatctttctcacgtcctgcattccccattgcagttcccctggcctcacaggcctcccatcttctgtcacactgcaggctgtgcttctttctcatgaccattgcctcccccactgcactgcattccctaagggcagggttttgtccctttgtcgcacccagaatagtgctgtacaccttaggcactcgatagttaacagtattcagcaaataaccagaaaagcaatttgtataacttttttaaggaattgagaaagagcgaagagttaaaggcagttcagagagttgtgatttgaaggctttgacatctttctttccttcttgaagcttcttgcatgctcggctccggacagctacgcttcggcatgacgcagacgggcaggccaccctgttgaacctcctgctgcggaattacctacactacagcttgtacgaccaggctgagaagctggtgtccaagtctgtgttcccagagcaggccaacaacaatgagtgggccaggtacctctactacacaggtgagcagaggggcccaacccataaatcagaaggtgtctcaggcctgcctggtgcaaattttccaaggggtggtgcataagaggcccatttggcaccctggcttgtcggtggggagttggatgaccctactctgttgaccaactctcctctcctccactcccagggcgaatcaaagccatccagctggagtactcagaggcccggagaacgatgaccaacgcccttcgcaaggcccctcagcacacagctgtcggcttcaaacagacggtgagccacaactaccatcatccctttgcctcttttttttttttttttttaaatggtgtcttgctatgttacctgggctggtcttgaactcctgggttcaagaagtcctcccacctcagcttcccaaagtgctgggatcacaggtatgagccaccatgcctggcccctttgcctgttactcattccctaccacttcagttctcttctctatgctaggggctaggaaaggcatccttaaccttcctatccagaaggacttcaacttttattattattttttgtgtgtgtggagacaggcatatcactgttgctcaggtgagaactcctgggctcaagcaatccttcggcctctgcctccctaagtgctgagattgcaggtgcgagctgccatgtctgcaaaaggttgcttcacatctatttgtgggtgtcaatgaagcagacactacctgcacctctggcagtggatattcagagtgtttctggcagataggtttagaatattcctgattccccagcgctcctgacagtcattccaggcttggacctagattgtgttgatacaaaccccaggtttttatctagtccttcatgttcacatttggaaactgtattgtctgtggccaaggaacccagaaaatctctgcaaggctgagtggctcaagtaaacataaaacttggccacttaagagctgtcagtcagcaagtatttaagcatcaaccttggtattaggcactgtaagggataggaagggaggataataagtgatctttctttcttttctttcgttttttgttttctgagacagagtctccctctgtcactcaggctggagtgcaatggcacgatcttttctcactgcaacctctgcctcccgagttcaagtgattctcctgcctcagcttcctcagtagctgggcaggcgcctgccaccacatccaactaatttttttgtttgtttttttggttcttttttttgaaacggagtcttgctctgtctcccaggctggagacagaggtgccatcttggctcactgcaacccctgtctttggggttcaagggattctcctgcctcagcctcccgagtaactgggattacaggcgcctgccaccacgcccagctaattttttgtatttttagtagagatggggtttcaccatgttggccaggctggtctcgaactcctgacctcaagtgatccacccacctcagcctcccaaagtcctgggattacaggcgtgagccaccgctccaggccaggtatttcttattattagagtatttcaaagagataaagaatgttgtgtcagaaagcttgagggtgtatgtgaagtcacagagcccagtagccaggatgtagacccagtcttcccaaattcaaacctctgctcctaccttcacacaacatccacctccatggtgtcttgacagggaacgggagacgtgtgttgattaggtcaatgtagtaggagattcattttatttctgttcagaagttcagagaaagtcagatttgtttttgatcaaataatgaaagagaaagggtcttaaagaaaaagttggctaggtacagggctcacacctgtaatcctagcactttgggaggctgtggcaagaggattgcttgagaccaacctgagcaacatatggagacaccgcctctgcaaaaattaaaaacctagctgggcgtgatggcatgcacctgtagtcccagctacttgggaggctgaggtgcaaggatcacttgggcccaggaagtcgaggctgcagtgagccatgatcgtgccactgcactgcagcctgggcgacagagcaagactctgtctcaaaaaaaaacaaacattaaaattgaactggtctttgaaagatgggtaggattttcacaaggagtaaaggcttttcagacacacagggtgcgtgagcaaaatgttagattgcttacaatatgagagacactaaagtttcttttgaaaatcactaaaaatactagtaattaacatatataaaatgtgtcatgtaccatgagagaggctttcaggcatttaaatctcagtggcaggaaggcgtagagagctggaagagaggtctcgggctgttggtgagggagcgcagggagagagagggcgggagtgaaggcatgtttgggagaaggcctgcaaccagccctctgccctctgccctcacacacctttgccgtacccctgtcaccacccagcttacagaatcacctggggctctgatgaagctgtagattccgattcagagagtctgtgttcctaacaggccttgggtgatgccagtgctgctggtggcacagagcgctctgaggagggcggtgctggctcatcctgttcaaagcggaggtcagctagcattcattcctgcagccaccttgtctcttgtaaacttgaatgtctctctccgcccattttcaccctccctgtctttacttaacaccagcttcactacctgtgttttccatcacactccttcctctctcttctagccttggcccatcacctgtttgcttcagtctccgggaagaaaacccccagccctgctgcttcctctctcaggcggccgttcctgtctcccctggctccctccccaacagtgcactggccagccccttccctccagtgttctctctgctccttctcaccacctgggcctcagcagagcactctgagagcttctctgtcgatagtaaaaccctcattctctccttgagtgaccttgtttgctttcccagcttcagcgctcgcctgcatgatgctcttcagcctgtacattactaactccgttactctgctggcactgccaccgcaaggtcccacagacttggcggcttaaacaaccgaaattgatttcatcacaattctggaggctctaagtccaacagcaaagtgtgacacgattggtttcttctgagggcctctctcgtctgcttgtcgatggccgtctcctggtgttttcacatggtcttccctctgtgcgtgtctgtgtcctgcttttgtcttagaaggacaatagtcatgtaggattagggtccacccatatgacctcactttaccataattacctctttaaaggccctgtgtccaaatagagtcccattctgaggtactggggtttaggtctctaacatgaacttgagggggatgcagtttagcccataacactaactctgacccctctcacgagcatcaggcctgcagatccagctccccctcccactccccatgtctctctctacagcgtgtcccaaagagatccctcctggcccccttaccattccttcctcctgctttcccgatccagatcagggccttgggatcatctctgactctcccccatcctccttcccatcacttggtcgtctgttgaattgtctgcacatcttctgtgtttgcctgttccttcatattgccagtgccatggtttgagccactaacattcccagacacttctgcctggtcatcttcctctccagcagcccagcttacattcacttgccttactaagcagagctccagctctgtccttcccttgcctgggaagcttccattgctccccactgctgtagggtatcataacggtcttgtgaggtagacaggctaggtattgttattgttatttggtagttttagagatgaggaactaaggacccagttgctcagtgtttcctagctagtgaatagagactagacaccaagtgttctacgtgcagactttatactgctcagcctggcacacaaaatggcaatggcatagtccccagactgcggtcccaactgtctctttcctaacagctccccaggcacccacacttttctgcctctttttcaatctgtacccttgaccctcctcctttttctgctttgtcagactccttaaggcacttcataaattaaccatttccagggatttcccctcacacatgagttattccagtggacagggcagcctcatgggtgcctgtggagggtgaagggtctgcctggccgtaggtgtgatcacacactcccgttgtaacccctgtctcctgtgacacttgctgccccacgatttagctgctttgtgttccgtgcctcctgtttgctggtgaactcctgagttggggggcgtcattccctccactgtagttcttccgcgatgctgactccacccacggtcagcaccactcggaaatacttcacagtcctgtagaggaagacaggtccaggtttccagttacccttctatgtctggatactctgctcattcactgaagccaggccccttcctgcacttatgcctctacccagataatgagttctacccactgatgacctcctctcctctagtaacagtccgcctccctaatgagcatctctggctgacacacgttccgttctccaggcctgtgagccctggtccctcgctgttgctgagccacagcacccgcccttctggcctcactttagagcactgtcatttcagagcagactacgcgcggggtggccaggtgaaatgcagctgacggctctgcgaccaaatgtgaccaaagggccacattcccagcacccggctccaaaggcagagcttggattctatgcccagcacaggttttcagggcttcctcctctctctgggcctaaacagtgatccctttccctgtttcccactacatctggcagaatttaggccacatttcattttcttcttccgcccatggggctccctgcccactgtgttcccctgtcactctgtccaggtgcacaagcttctcatcgtggtggagctgttgctgggggagatccctgaccggctgcagttccgccagccctccctcaagcgctcactcatgccctatttccttctgactcaaggtaaggctggcttccccaccccagagcccactaggcccccttcagtggggcctcttacatgcctgtgcctatttgcatcatccaatctactcctgttctgcctgcagctgtcaggacaggaaacctagccaagttcaaccaggtcctggatcagtttggggagaagtttcaagcagatgggacctacaccctaattatccggctgcggcacaacgtgattaagacaggtgtggatcaggatctgaggggctgttggaggagcagaagccaggccagggcaaacctagtgggtatccttgggcaagtgaagggtctgtgtccactctgcccaccccatcgctccttcctctcccaggtgtacgcatgatcagcctctcctattcccgaatctccttggctgacatcgcccagaagctgcagttggatagccccgaagatgcagagttcattgttgccaaggtggggctggttcaggaaccacagtgaccaggttgtcactttcctgccaatctcaggaggcaggagtgggaggagtttggccaaggaggggaataggtaaagcaatggcatagtcatttcagggcgtgcccgtcatttgcagtgaagccaagaagttgccagagagagcatggatgtgcatgtgagtgtgtgagtgtaggtgtgtgcacatgttgagtttatgatagtgcctgtgagtgtgagaatataaggagggcagaggaatgggatggaacaagatgttctctgacttagaagatgggcgtgctgggccaggcgcagtggctcatgcctgtaatcccagcactttgggaggctgacatgggcagatcacctgaggtcaggagtttgagacaagcctggccaacttggcgaaaccccatctctactgaaaatacaaaaattagccaggcctggtggcaggttcctgtaatcccagctacttgggaggctgaggcaggagaatcgcttgaacccgggaggtaaaggttgcagtgagctgagatcgcaccaccgcactctcctgcctgggtgacagagcgagactccatctcaaaaaaaaaaaaaaagaagaagctgggtgtgctggtgaactttcctctttgggggcctgcaggccatccgggatggtgtcattgaggccagcatcaaccacgagaagggctatgtccaatccaaggagatgattgacatctattccacccgagagccccagctagccttccaccagcgcatctccttctgcctagatatccacaacatgtctgtcaaggtgagaagcccgtggctgcagagtcacgcctggcagcagcacacccctccctccacactcatggattcctcagagaagactggcttaatttgtggcccacgtcccagccaatctctgtaaaatcactgagctgcagcacagggggcccagaatggggaggggacttggccatagttccatagccagttgccctctcctattgcgtttaagggatgatgtggtcaccagggaggaccaggcagggattcagagggcggggttctacatttggttccaaatttgaggcatttaacttctcaaagctctgtttctccatctctgaagctgatagggaggtgttacctgtcttgcttgcttcacagggttggtaagattaaaagaagtccctgtattgaggcacttagcgaagtctaaattgtaaaaaagatggcgctggtatctagctccacaaaagggtgagcccttatcctcagttaagcactgagtttggcgctgttactatttgcttgccatgtttttttctggtctcctccgaggaaactaggatattgctgccttgcttaaaatctggctaagccctactccacgtgacatgcaaggccctttgtgacctggtcccttaggtcaagcctcccctcccactcctgccccaccacccagcagccagcccactgggtgcaggccaggcccctcccacatggaatcctccaccgggaaggcctctccccgttgccacatccactgtgttcctccttttcctcctccctgcccagtcaagagagttggtcgtttattcctcttttttcagcatttcccacagggcactgtaataattcctttgatgcctagccccccactagactaactggagaggggcccgccgcttcctgcctggtgtctagctcacagaggggacgcagggagtgcaggttgcgtgagtgcctcacctgcttccttccctcgctcatctcctctctttgctgtgccccaggccatgaggtttcctcccaaatcgtacaacaaggacttggagtctgcagaggtaagctctctgctttctgggtgagaccgaaaggtcaaacttccacacagaaggggagtcgggcgagtgtctggaagggctgagctgctctgaagctttggcctcacttgcctctctccccaggaacggcgtgagcgagaacagcaggacttggagtttgccaaggagatggcagaagatgatgatgacagcttcccttgagctggggggctggggaggggtagggggaatggggacaggctctttcccccttgggggtcccctgcccagggcactgtccccattttcccacacacagctcatatgctgcattcgtgcagggggtgggggtgctgggagccagccaccctgacctcccccagggctcctccccagccggtgacttactgtacagcaggcaggagggtgggcaggcaacctccccgggcagggtcctggccagcagtgtgggagcaggaggggaaggatagttctgtgtactcctttagggagtgggggactagaactgggatgtcttggcttgtatgttttttgaagcttcgattatgatttttaaacaataaaaagttctccacagtgctttgtgcatcagttactatacttcactgcagtattggcaggctcagattttgggttttttggccttagagtactagccccaggtgtgtaatctgagggcgatgggtctgcagatggggaggtgcccaggggaggatgaagggaccctgacctggggtcgggggcctaggtttactctcttttcgtacttgtgtggctttggtaaggtcttgttaggaaaggtgtaccatgtgtccatcaccagctgcagaccttcatctcccaatacacctcatggtgcttcacggttattgcagtttttacaaattgaaggtttggccaggcatggtggctcatgcctgtaatcccaacactttgggaggctaaggtgggcggatcactaaaggtcaggagtttgagaccagcctggccaacatggcaaaaccccgtctctactaaaaataaaaaaatcagctgggcatggaggcaggcgcctgtaatcccagctacttgggaggctgaagcaggagaattgcttgaacccgggaggtggagcatgcagtgagccaagatctcgccactgcactccagcctgggcaacagagtgagactgtgtctcaaaagaaaaagaaaaggacaaattgaaggtttctggcaacactgcatcaagcaaatctgtcggtgccattttcccaacagcatgtgctcacttagcgtctctgggtcacattttggtaaatcctctcgatatctcaaactttttcattatatctgttatggtgatgtgtgatcggtgatctttgatgttactattgtcattgttggggcaccacaaattgcacccatataggatggtgaacttagccgggcacggtggctcgcgcttgtaatcccagcactttggcaggccgaggcaggtggatcacctgaggtcaggagttcaggaccagcttggacaacatggggaaaccccgtctctactaaaaatacaaaaaacagccgggtgtggtggcaggcgcctgtaatcccagctacttgggagactgaggcaggagaattgcttgaacccaggaggcggaggttccagtgagccaagatcgtgccattgcactccagcctgggtgacacagtgagacattgtcaaaaaaaaaaaaaagatggtgaacttaataaatgtcgagtgtgttctcactgctcacactgctcactccattccctgtctctctccctcttcttgagtctctccatgccctgagacacaaaataatattgaaattaggcctgttagtaaccctacaatggcctcttaagtgttccagtgagagaaagagtcattggccaggcctggtgactcacgcctgttatcccagcactttgggaggccaaggctggtggaccccttgagctcaggagttggagatcagcctgggcaacacaatgaaaccttatcgctacaaaaaatataaaaattagctgggcatgtggcacgcacctgtagtcccagctactaggaagcctgaggtggaaggagcccttgagcctgggaggtgaaggcagaggctgcagtgacctgagatcctgccactgcactcccacctgggcgacagtgagaccctgtctcaaaacaagaaaacagaaaaagggagaaagaatcacacatctctcactttcaatcaaaaggtcaaaatgattatgcttagtgaggaaggcatgttgaaagctgagagaggccaaaagtcaggtctcctgcaccaaacaggtagccaagttgtgaagggggagttctttaaggaaattaaaagtgctgctccaggttgggcacggtggctcacaactgtaatcccagcactttgggaggctgaggcgggcagatcacaaggtcaggagttcgagaccagcctggccagcatggtgaaaccccgtctctactacaaatacaaaaactagccaggcatggcagtgggcgcctgtaatcccagctactcgggaggctgagataggagaatccttgaaaccggaaggcagaggttgcagtgagccgagatcacaccactgcacttcagcctgggtaacaaaagcgaaactctgtctcaaaaaaaatgttttaaaaagagttcgagaccagcctggccaacatggcaagaccccatctctactaaaaatacaaaaaattagctgggcgtggtggtgcatgcctgtactccgaactacttaggacgctgaggcaggagaatcgcttgaagtggggaggcggaggttaccatgagtcaagatcgcaccactgcactccaacctgggtgacagagcgaaattctgtctcaaaacaataaaaaataaaaatgataaattaaattaaaagtgctgctctagtggacacacaaatgatatgaaagcagaatagcattattgctgatacggagaaagtttgagtctggaaagaagatcaaatcagccacaacattcctttaagccaaagcctagtccggagaaaggccctcactctcttcaatcctttgaaggcagagagaggtgagaaagttgcagaagaaaagtcagaagctaacagaggttgttttgtgaggttgaaagaaagaagccgtctctgtaacataaaagtgcaaagtgaagcagcaagtgctgatggagaagctgcagtaagttatccatcagatctagctgatctcactgacgaaggtggctacactcaaaaacagactttcaatgtagacaaacagccttctattggaagaagatgccacctgggactttcatagctacagaagagaagtcaatccctggcttcaaagcttcgaaggacaggctgactctcgttagggctaatgcagctggcgactttaagttgaagccaatgctcatttaccattccgaaaatcccagggctcttaagaatgatgctaaatctattctgcctgtgctctgtggatggaacaacaaagcctggatgacagcccatctgttcccagcatggtttaccgaacattttaagccactgttgagaccaactccttcgtcggctctgtcggccaggctggagtgccgtggcatgatctcagctcactgcaacctctgcttctaggttcaagcgattctcctgcctcagcctcctgagtagctgggattacaggcatgagccaccgcactcagccaaaaaaaatattttttaaagttattactgctgattgacgatgcacctgattacccaagggctctgatggagggataccagggaaataatattgttttcattcctgctaacacatccattctgcagcccatggatgaagaagtaatttcaactttcaagtcttttttaagaaatacattttgtaaggctagagctgccatagtgattccgctgatggatctgggtaaactgaaaacttagaaagcattcatcattctagatgccattaagaatattcatgattagggccggacgtggtggctcatgcctataatcccagcactttgggaggctgaggcaggtggataaactgaggtcaggagtttgagaccaagctggccaacatggtgaaactccatctccactaaaaataaataaataaataaataaataaataaataaataaataaatacaaaacttagtcaggtatggtggcacgcacctgtagtcccagctactcgggaggctgagacatgagaatcgcttgaatccgggaggcagaggttgcagtgagccgagatcgtgccaatgcacttcagcctgggtgacagagtgagactctctcaaaaaacaaaaaaagaatattcatgattaggccgggagtggtggctgacacctataattccagcactttgggaggctgaggcaagaagatcgcttgagcccaggaggccaagagcagcctgaataacaaagtgagaacccatctgtattaaaaaaatttaaaaattaggccgagtgcagcggctcacacctgtaactccagcactttgggaggatgaagcgggtggatcacttgaggacaggagttcgagaccagcctgaccaacatggtgaaaccacatctctactaaaaatacaaaattagccgggcatggtggcgctttcctgtaaccccagctatttgggaggctgaggcaggagaatcgcttgaacccgggaggcggaggttgcagtgagccgagatcatgccattgcactccagcctgggtgacaaaagcaaggctccatctcaaaaaattaacattagcaggagtttgaaagaagttgattacaaccttcatgggtgactttgaggggctgaagacacacttcagtggaggaaaaaactgcagatgtagaaatagcaaaagaactagaattagaagtggaccctgaggccaggcccactggctcacacctgcaatcccagcaatttgggaggccagggcaggaggataacttgagctcagaagttccaaaccaacctgggtaacatagcaagacctcgtctctacaaaaaaaaaaaaaaaaaaaaaaaaagtggagcctgaagatgggactgaattgctgccatctcatgataacatttgaacagatgagttgcttctatggatgagcaaggaaagtggtttcttgagatggaatctactcccggtgaagaggctgtgaacattgctgaaatggcaacaaagatttaggatattacatatacttagttgataaagcagcagcagtttgagaggattgactccatttctttctttctttttttttttttttgagatggagtcttgctctgtcgcccaggctggagtgcagtgcagtggcatgatcttggctcactgcaacctccacctcctgggtccaagaggttctcccacctcagcctccccagtagctgggactacaggtgcacgccaccacgcccagttaatttttttctatttttggaagagatggggtttcaccatgttggccaggctggtctcgaactcctgacctcaggtgatccacccgcctcagcctcccaaagtgctgtgattacaggcgtgagccaccgctccaggccagcattgacttcaattttgaaagaagttctactgtgggtagaacgatgtcaaacagcatcatatgctatagagaaacctttctagaaatggagagtcggccgggcatggtggctcacacctgtaatgccagcactttgggaggccgaggcgggcagatcacctgaggtcaggagttcgagaccaacctggccaacatggtgaaatctcgtccctactaaaaatacaaaaatgagacgggcatggtggtgggagcctgtaatcccagcttcttgggaggctgaggcaggaaaattgcttgaatctgggaggcggagcttgcagtgagccgggatcgtgccactgcactccagcctgggcaacagagggagaccccatctcaaaacaaaacaaaacaaacaaaaacacaaaaatgaaaaaagaaaagtcaattgatgcagaaaatttcattattttcttattttaagaaattgttttcacctgaaggcactaggaaaaataaaaacaaaaataaggaaaaaaaaaagaaattgctacagtcaccccaaacttcaccagccaccaccctgatcagtgagtggtcatcaacatgaggcaagacccttcactagcaaaaagattaggacttgctgaaggcacagatgattgttagcatttttagcaataaaggttttttgttttgttttgttttgttttttgaggcagagtcttgctctgtcacctaggctggagtgcaatggtgcattcttggctcactgcaacctctgcctccggattcaagcgattctcctgcctcagcctcctgagtagctgggactataggcgccagctaccacacccggctaatttttgtacttttagtagagacggggtttaactatgttgtccaggctggtctcgaactcctgacctcaggtgatccacccgtctcggcctcccaaagtgctgggattacaggcacgagccactgcgcccggccaattatttttaaattaaagtatgtacatatatatgtttttaaatataatgctattgcacacttaatagactacggtatagtgtaaacctaactttttttttttgagacagggtctcactctgtcatccaggctgaaatcagtggcactatcacagctcactgtagccttgacctcttcgggctcaggtagatgatcctctcacctcagcctcccaagtaactgggactataggtgagtgccaccacacccagctaattttttatttttttgtagagatggggtcttgcaatgttgcccaggctggacttgaacttctgggctcaagtgatccgtccgcctcggcctccctaagtgctgggattacaggcatgagccaccgtgcccggaccatattgtgtaaacataacttttctatgcagtgggaaaccagcacctctgtgacaccctttatcgtggtggtctggaaccgaacctgcaatatctccgaggtctgcctgtattcataatttccattaaatacaggttttggcctggccttgctctggctcctgatcatactccagccctggtcacaatatttggcatcactaccttcctttaatcttcagctgcctttcggtaaaatgaaactcctaaagttgactttgcaaaacaacacttctcctgtgtttcccaaacccgcccttcaatctctgtggcagatgttttgatcctagcgtccggattcttcatctatttttagggctccaatccttgccccattttaacctttgattttgcaaaccaatcccaaaaccttctcatagatctttgattcccttccaggaagggtgtggtgggaggactacggttaagcacctcctccgtgtccttttaggatgtgaggacaggttcaggtgggttaaatgagtcctgcagttgaacccaggctgacctgataccaagttcaatgcgccttctctcaggctgtgctgccttcttccggcctcagcttggatgtattagtcagggtcctctagagggacagaactaatacaatagttgtatatataaaggggagtttaaggagtattgactcacgcaacaggccgtctgcaagctgaggagcaaggaagccagtccgcatcccaaaacctcaaaagtagggaaggtaacagtgcagccttcagtctgtggtcaaaggtccaaacgtcccaaagctgaagaacttagagtccagcgttcaagggcaggaagcatccagcacgggagaaagatggaggccagaagactcagccagtctggtctttccatgctcttctgcctgctttttattctgcctgctctggcagctgattagattgtgctcaccccaattgaggtctacctttcccagtcctctgactcaaatattaatctcctttggcaacaccctcacagacacacccaggatcaatactttgtatccttcaatccaatcaagttgacactcaatattaaccatcactctggggttctgttatccagtcagtcttcatttgtctttgggtctccatgtagcagtccttctggcccttgacagctttccatgacttcaaaagccaacttttcttgagtgtgtgatccgaagacatacatatggcaggcacagctgcctgaagccctttccagcctgttcaatgtttgtagctgtaatgagcattcttcctgaggagcccagcctcacaagaggttataaatcttcagccttggttgtaagtgaccggagagagtttatcaccctcttccagagagctgaggtcattcgccatgattccctggttcttgcccacataaggtctatgggccatttttccgtctgctcactgtctagaggcttcttcatccactgtctggatgaaccttgttggcgtggcttctaatttcctgaagaaactcagtgtcacttttttttttttttttaaagacagagtctcattctgtcgctcaggctggagtgcagtggcacaatcttggctcactacaacctccgcctcccaggttcaagcaattatcctgcctcagcttcccaagtagctgggattacaggcacacgccaccatgcctggctaatttttttgtatttttagaagagatggcgtttcgccatgttggccaggctggtcttgaacttctgacctcaggtgatccacctgcctcggtctcacaaagtactgggattacaggcatgagccaccgcgcccagccaagtgtcactttcatgcttagaaagttcactgtattattttaccttccagctttgtttgtttgtttgtttgttttgggacggaatctcactctgtcacccaggctggagtgcagtgttgcgatttcggctcaccgcaacctctgctgccagggttcaagcgatcctcctgcctcagcctttccagtagctgggattacaggcatacaccaccacacccagctgatttttgtattttagtagagatggggtttcaccatgtgggccaggttggtctcgaactcctgacctcaagtgatccgcccgccttggcctcccaaagtgctgggattacaaacatgagccaccctgcccggctaccttccagttttgttttgttttttaatttgaaaactacatagaagtacaaagaataacataacaaatatgtacccatatattctccacccaagtttaatcatgttaacatttcattagtctgtgaagttttttaatcaaaaaagaaataaattggacaccatggttcatgcctataatctcagccctttgagaggccaatgcaggaggatcgcttgagcctagaagtttgagaccagcctgggcaacacagtaagatcccatctctacaaaataaataaataaataaaacattatggctaagctggaagtccatcttgttcccctggcaaagccagccactttaatgaattcagctggcaggcttctagtttgtttttatacttctactacataatagtattgagctgccaggtgcaatggctcacgcctgtaatcccagcactttggaaggctgaggcgggaagattgctcgagcccaggagtttgagaccagcctgggcaacatggcaaaccccctctctataaaaaacacaaaaaaggccaggagcagtggctcacgcctgtaatcccatcactttgggaggccgaggcgggtggatcacaaggtcaggagatcgagaccatcctggctaacatggtgaaaccccatctctactaaaaatattaaaaattagctgggcgtggtggcaggcgcctatagtcccagctactcaggaagctgaggcaggagaatggcgtgaacctggaaagcggagcttgcagtgagccgagatcacgccactgcattccagcctgggcaacagagtgagactcctactcaaaaaaaaagggcctggtgcagtgggtcatgcctgtaatctcagctctttgggaggccgaggtgggcagatcacatggtcaggagatcgagaccatccttgaccaacatggtgaaaccccgtctctactaaaaatacaaaaattagctgtgcctggtggcgcgtgcctgcctgtatactagctactcgggaggctgagacaggagaattgcttgaacccaagagtcagaggttgcagtgagcaaagatcttgccatagcactccagcctggcgacagagagagactccatctcaaaaaaaaaaaaaattaggcaggcacagtggtgcgcacctgcagtcccagctacttagggaggctaaggtggaaggatcccttgagccctggggggcagaggtttcagtgagccaagattgctccactgcactccagcctaagtgacagagtgggaccctgtctcaaaaaaaaacaagaataatattgagcttttattcattttattattgaattagtctgttctcacactgctataaagatacctgagacagggtaatttataaagaaaagaggcttcactggctcatggttctgcgggctgtacaggcttcttgcttctcaggaggcctcaggaaacttataatcataagaggaaggggtggaagacgaaggggaagtaatcacgtttccatggtgggagcaggagaaagacaaaaggcaaaagggaaggtgcaacacacttacctcccaccaggccccacctccaacactcagaatcacaattcaacatgagatttgggtgggcagacagagccaaaccatatcaattttatttatttatttatttatttatttttcgaggacagggtctcactctgtcatccaggctggactgcagtggggtgattacagctcactgcagcctcaacctccctggcccaagcgatcctcccacctcagcctcccaggtagctagaactacaggcttgcacaaccatgcccggcaaattttttgattttttttgtagagatggggcctccttatgtcgcccaggcttatcttaaactcctggactcacaagcaatcctcctatctcaggctccctacgtgctgggattacaggcatgaaccaccatgcccggccagtattgagtcttaaaattcttgtaactggtatattacaggaatgtaatttgctctgttttcgctcaatattgtttttagacctaatcacattgatgcccatgccaagcactgttctgggcactgagaatacaaattctcagagtcttcactctggacagctttcctctcagagtctttcctctcagagtcttcactctggacaggttgggaggcatacatagtatgaagggaccagtatctatctagctattcccatgttgatgggcattgcaaatgcatttccattggtttactataacagtgttccaaagaacatctctggccaggtgcagtggctcacggctgtaatcctaacactttttaggaggccaaggcaggaggatcacttgaggacagtagttcaagaccagcctgggcagcatagggagactgtctctacgaaaaatcaaaaaattatggccgggcatggtggctcacgtctgtaatccctgaactttgggacatcaaggcaagtggatcacttgaggtcaggagttcgagactagcctggccaacatggtgaaaccctatctctactaaaaatacaaaaattagccaggcatggtggcaggcacctgtaatcccggctactcaggaggctgaggcaggagaatcacttgaacccaggaggcggaggttgcagtgagctgagatcacaccactgcactccagcctgggtgacagagcaagactctatctcaaaaaaaaaaaaaaaatcaaaaaattagccaggcatggtagtgcacacctttagtctcagctactcaggaggctgaggtgggaggatcacttgaacctgggcagtcaaggctgcagtgagccaagatcatgccactgcactccagcctgggcaacagagagagaccctgtctctaaaaaaataataataataaagaaaaaaacagctctgtttatgtctcctggtacatacatactatgtatatagtttgcaaactcaaagatccagatagtcaattttttaggcttgtgggccgtatggtctctgtcacaatcactctgccctgtctttctagcacaaaagcagctataaacaatacatacatgaattttttatagacatcgagatttgaatttcatatgatttttacattttataaaataatctttttaaaaattttcccctaaccatttaaaagtgtaaaagccggccaggcgccgccatggctcacgcctgtaattccagcactttgggaggctgaggtgggcagatcacttgagatcaacagttcgagaccagcctggccaacatagcaaaaccccatttctactaaaaataaaaaaattagctgggcatagtggtgcacacctgtgatcccagctacttgggaggctgaggcaggagaatcgcttgaacctgggaagcggaggttgcagtgagccaacatcatgccactgcactccagcctgggtgacagagtgagacttcgtctcaacgaaaaaaaaaaagtgtaaaagccattcctaattcagtgtacatcagtgtacatactcaggtctgcgtactcctgctctgaggcatacctgagaagtagagttgcttggtcacaggacatacacatttccacattaactagacactaccaagttgccatccaaggaggttttttttttacaatctacactccccccagcaacaaatgagagttactccagatcctttacaaagatgctctaagcccagtaccagatgaaaacaggaagtgggaggggaagctgccagccccttctaaccatgaagaaatacctggtagagccttctggatgctggaaggatgaataacgggggtctctggagcctgccccctgtcagatcactgtgacttctgagcctccagtccagctcagccccatgtgtcatggccagtgataatgagccctcactctctgtttggtctttattctcccccatgtggggctgaagtctggattgagccgttattcaagatgtacagctttcttgacaggaaagtagtgtcacagaaacagcaggggcttggcaagatgatctaactgcaaatcctacctggctcagccaccagctagttctgtgatcttgaacaagttttttcacttctctgaggccatcccttggctacaacacaccagttggttgacaggatgaaatgacgaaagtgccttacacctgtaatcccagcactttgggaggccaaggcgggtggatggcttgagcctgagaggtgacagcatgccggcagtcctcacagccctcgttcgctctcggcgcctcctctgcctgggctcccacttcggtggcacttgaggagcccttcagcccaccgctgcactgtgggagcccctttctgggctggccaaggccagagccggctccctcagcttgcagggaggtgtggagggagaggctcaagcaggaaccggggctgcgcgcggcgcttgcgggccagctggagttccgggtgggcgtgggcttggcgggccccgcactcggagcagcgggccagccctgccaggccccgggcaatgagaggcttagcacccgggccagcggctgcggagggtgtactgggtgccccagcagtgccagcccgccggcgctgtgctcgctcgatttctcactgggccttagcagccttcccgcggggcagggctcgggacctgcagcccgccatgcctgagcctcccctccatgggctcctgtgcggcccgagcctccccgacgagcaccaccccctgctccacagcgcccagtcccatcgaccacgcaagggctgagaagtgcgggcgcacggcaccgggactggcaggcagctacccctgcagccctggtgcggaatccactgggtgaagccagctgggctcctgagtctggtggagacttggagaacctttatgtctagctcagggatcgtaaatacaccaatcagcaccctgtgtctagctcaggttctgtgaatgcaccaatccacactctgtatctagctactctgatggggccttggagaacctttatgtctagctcagggattgtaaatacaccaatcggcactctgtatctagctcaaggtttgtaaacacaccaatcagcaccctgtgtctagctcagggtatgtgaatgcaccaatcgacagtctgtatctggctactttcatgggcatccgtgtgaagagaccaccaaacaggctttgtgtgagcaataaagcttttatcacctgggtgcaggtgggctgagtccgaaaagagagtcagcgaagggagataagggtggggccgttttataggatttgggtaggtaaaggaaaattacagtcaaagggggtttgttctctggcgggcaggagtggggggtcgcaaggtgctcagtgggggtgctttttgagccaggatgagccaggaaaaggactttcacaaggtaatgtcatcaattaaggcaaggacccgccatttacacctcttttgtggtggaatgtcatcagttaagttggggcagggcatattcacttcttttgtgattcttcagttacttcaggccatctgggcgtatatgtgcaagttacaggggatgcgatggcttggcttgggctcagaggcttgacagctactctggtggggccttggagaatgtttgtgtcgacactctgtatctagttaatctagtggggacgtggagaacctttgtgtctagctcagggattgtaaacgcaccaatcagcgccctgtcaaaacagaccactcggctctaccaatcagcaggatgtgggtggggccagataagagaataaaagcaggctgcccgagccagcagtggcaacgggcacaggtccccatccacaatatggcagctttgttcttttgctgtttgcgataaatcttgctactgctcgctttttgggtccacactgcttttatgagctgtaacactcaccacgaaggtctgcagcttcactcctgaagccactaagaccacgagcccaccgggaggaatgaacaactccggccgcgctgccttaagagctataacactcaccgcgaaggtctgcagcttcactcctcagccagcgagaccacgaacccaccagaaggaagaaactgcgaacacatctgaacatcagaaggaacaaactccagatgcaccaccttaagagctgtaacactcactgcgagggtccgcggcttccttcttgaagtcagtgagaccaagcactcaccagtttcggacacaagcccaggagtttgagatcagcctgggcaacatgatgaaatgccctctctgcaaaaaaaaaaaaattacaaaaattggcggagcatggtggtccgtgcctgtggtcccagctacgcgggaggctaaagtgggaggatcgcttgagcctgggaggtgaagactgcagtgagctgtgattgtaccacagccctctaggctgggggacagactgagaccctgtttcccctccgcaaaaaaattgacaaaagtgtaataagaggtgcctgatatggctaggcgcagtggctcatgcctgtaatcccagcactttgggaagccgaggcgggcgggtcacctaaggtcaggagtgtgagaccagcctggccaacatggagaaagcccatctcttctaaaaatacaaaattagccggctgtgggggcagtggtggagcatgcctgtaatcccagctactcaggaggctgaggcaggagaatcacttgaacccaggaggcggcggttgcagtgagccgagatcgtgccattgcactccacccactccagcctgggcaacaagagccaaactctgtcttaaaaaaaaaaaaaaaaagtgcctgacatataagaggtgtgcaatgcaatagttgccaggcaacatgtttaagaatgtggagctcctgccttccatggtcctgttaaaaacccaccctcaaggccaggtgcagtggctcatgcctataatcccagcactttgggaggccgaggcgggtggatcacctgaggtcaggagttcgagaccagcctgaccaccaacatggtgaaatcccacctctactaaaaatacaaaattagatgagcatggtggtgcatgcctgtaatcccacctacttgggaggctgaggcaggaaaatcactagaaccagggaggcggaggttgtagtgagccgagatcgtgccattgcactccagcctgagcaatgagcgaaactccatctcaaaaaaacaacaacaaaaacccaccctctactcccagggagctgggtacagagctgggccacatcagtgcaaggtgctgagccacagagctaaggcggagctgcaggaccgcggaccagataacagtgtgtgagatcagtgtgtgagatcagacgtccctgccattggtgaccaccagggggcccccaagcaccagagatggccccatccagtcaccacatccacttctcatccagagatgtctgtttcttggcacgctggggtaaattaggacagaaggtgacagtcttgggtgtggtcagtcagactgccccaggcaggccttgtggcctgtagaaaacgttcaggcctaggccgggcacggtggctcacgcctgtaatcccagcactttgggaggccgaggcgggtggatcacgaggtcaggagatcgtgaccatcctggctaacacggtgaaaccccgtctctactaaaaatacaaaaaattggccgggcatggtggcgggcacctgtagttccagctactcgggaggctgaggcaggagaatggcgtgaacccgagaggcagagtttgcagtgagccgagatcgcgccactgcactccagcctgggcgacagagcaagactccatctggaaaagaaaaagaaaacgttcaggtctgagccagaggcccaggctgtaattctgtcacttaccatgaccttgggcaaggcacttccttccctggcccagttcacggggttggaatcgactccaaggtcccttccagcattaacgctgcatggttctaagatgagaagatggggcagtttcccctctctcaccccagcccgtgtccacttcaaggtgaatgaccagggaagtcacgtgtcccaatcccgcagttccaaagcccttggggaccctactgtcagggtcgtgcacgaggaggtgaaggtcaggtgagccaatcgcctcgaagggtcttgcctcattcgggacagacatccggtttcctctggctctaccgggattctaggggctttagccgaatgagtcatggggggcgggggggtttctgggggagttcccagctaatcaacttgggacaggacagcctggaactttcgatggtgcctatccaagtgtggggtgggcacagcagccaagacccaatgtccttatctcaggtaggggctcaggaggtctcccagacaggcagcctccggagagtttgggggtaggaatgggagcaaccagcttctttttttctctcttagaatttgggggcttgggggacaggcttgagaatcccaaaggagaggggcaaaggacactgcccccgcaagtctgccagagcagagagggagaccccgactcagctgccacttccccacaggctgctgccgcttccaggcgtctatcagcggctcagcctttgttcagctgttctgttcaaacactctggggccattcaggcctgggtggggcagcgggaggaagggagtttgaggggggcaaggcgacgtcaaaggaggatcagagattccacaatttcacaaaactttcgcaaacagctttttgttccaacccccctgcattgtcttggacaccaaatttgcataaatcctgggaagttattactaagccttagtcgtggccccaggtaatttcctcccaggcctccatggggttatgtataaaggcccccctagagctgggccccaaaacagcccggagcctgcagcccagccccacccagacccatggctggacctgccacccagagccccatgaagctgatgggtgagtgtcttggcccaggatgggagagccgcctgccctggcatgggagggaggctggtgtgacagaggggctggggatccccgttctgggaatggggattaaaggcacccagtgtccccgagagggcctcaggtggtagggaacagcatgtctcctgagcccgctctgtccccagccctgcagctgctgctgtggcacagtgcactctggacagtgcaggaagccacccccctgggccctgccagctccctgccccagagcttcctgctcaagtgcttagagcaagtgaggaagatccagggcgatggcgcagcgctccaggagaagctggtgagtgaggtgggtgagagggctgtggagggaagcccggtggggagagctaagggggatggaactgcagggccaacatcctctggaagggacgtgggagaatattaggagcagtggagctggggaaggctgggaagggacttggggaggaggaccttggtggggacagtgctcgggagggctggctgggatgggagtggaggcattacattcaggagaaagggcaagggcccctgtgagatcagagagtgggggtgcagggcagagaggaactgaacagcctggcaggacatggagggaggggaaagaccagagagtcggggaggacccgggaaggagcggcgacccggccatggcgagtctcactcagcatccttccatccccagtgtgccacctacaagctgtgccaccccgaggagctggtgctgctcggacactctctgggcatcccctgggctcccctgagcagctgccccagccaggccctgcagctggtgagtgtcaggaaaggataaggctaatgaggagggggaaggagaggaggaacacccatgggctcccccatgtctccaggttccaagctgggggcctgacgtatctcaggcagcaccccctaactcttccgctctgtctcacaggcaggctgcttgagccaactccatagcggccttttcctctaccaggggctcctgcaggccctggaagggatctcccccgagttgggtcccaccttggacacactgcagctggacgtcgccgactttgccaccaccatctggcagcaggtgagccttgttgggcagggtggccaaggtcgtgctggcattctgggcaccacagccaggcctgtgtatgggccctgtccatgctgtcacccccagcatttcctcatttgtaataacgcccactcagaagggcccaaccactgatcacagctttcccccacagatggaagaactgggaatggcccctgccctgcagcccacccagggtgccatgccggccttcgcctctgctttccagcgccgggcaggaggggtcctggttgcctcccatctgcagagcttcctggaggtgtcgtaccgcgttctacgccaccttgcccagccctgagccaagccctccccatcccatgtatttatctctatttaatatttatgtctatttaagcctcatatttaaagacagggaagagcagaacggagccccaggcctctgtgtccttccctgcatttctgagtttcattctcctgcctgtagcagtgagaaaaagctcctgtcctcccatcccctggactgggaggtagataggtaaataccaagtatttattactatgactgctccccagccctggctctgcaatgggcactgggatgagccgctgtgagcccctggtcctgagggtccccacctgggacccttgagagtatcaggtctcccacgtgggagacaagaaatccctgtttaatatttaaacagcagtgttccccatctgggtccttgcacccctcactctggcctcagccgactgcacagcggcccctgcatccccttggctgtgaggcccctggacaagcagaggtggccagagctgggaggcatggccctggggtcccacgaatttgctggggaatctcgtttttcttcttaagacttttgggacatggtttgactcccgaacatcaccgacgcgtctcctgtttttctgggtggcctcgggacacctgccctgcccccacgagggtcaggactgtgactctttttagggccaggcaggtgcctggacatttgccttgctggacggggactggggatgtgggagggagcagacaggaggaatcatgtcaggcctgtgtgtgaaaggaagctccactgtcaccctccacctcttcaccccccactcaccagtgtcccctccactgtcacattgtaactgaacttcaggataataaagtgtttgcctccagtcacgtccttcctccttcttgagtccagctggtgcctggccaggggctggggaggtggctgaagggtgggagaggccagagggaggtcggggaggaggtctggggaggaggtccagggaggaggaggaaagttctcaagttcgtctgacattcattccgttagcacatatttatctgagcacctactctgtgcagacgctgggctaagtgctggggacacagcagggaacaaggcagacatggaatctgcactcgagcagccaaagcctggcagggaagacagaggcacagggaccatgggaacccggaaaggagagggcatggggtctgggtgggcttaacaggccagacacagccagacaagatgaagccagggagtgctgagcatctgcaccaggcttgtcatttaccatcttccataaacttgagcccatccatcaagttgcccacaaagtggaagccaagttcaaggtgaccactggggtcagagcttctctcctcagactcggtctctgcactcgccccagctggtcacttcctgcttgtggcagccttgggctgaagagcgctaagctcacagcccaggagggtggggagctgtggcaagcagggggggcagcgaccgcaccacaggtgtgaggcctgcctgcagccaaagactcctgtgtggctttggggtacccccaccagtccccagtccactatctgcccaaaccttctcctcctcagctcctcagtccctcccacctcccctgcccgtggctcctcggaaagcagggtcagaagttcccactgccagctcggagtcatccatctaggggctcagagatgtgtgaggcaggcaaggaagggttaaagaaaggtccggcccctcatccccccgcctcccatcccccagtccttttttggaggcaacagatcaaatcccaggctagtcagagtgtgggtggtgttggaccaggttcgggagacagcagagcaggccaccctgccccagcactgtggggccctgagccaaagcctctcccctttcagggtacagctggctttgggggagggggcagcaggccagccaacttggctccaaggaagggaagctgctttcccctggcccttccccagctgagcaagcccacataggaccctgagccctgccgcctctgctcctcttcctcctcctcctcaccacaggagtgagccgttccctggccacagcacaggagtccagggagaggacactatgccctgccccgggtggcaccaataccaacagcacacacagtcacaaagggagccacgaggagctttatttatacatgaacgaaggtagatttccctcacatattacaaaatacacacaaacacacacacacacacacacacacacacatacacactttgcatctagaaagttcctcagaggtaagactactcctgggctggggcgggcgcacacaggggtgaccactgggcttgtggtccaggctgctcactctcctcaggtgccagcagatggagaggaaattttgaaagaagaaaccgggagacatcctggaggtcaggagtcaggagcggggaactggaagccgctagaggctcttgcaccatgtggagcggatgtgaggcacgatgcctcatctttcctcactgcttcccttggaggcgcctggggctgcgccagtccccagcccccactgcggccatgccaagcccctcagagtgcagcaatggctttagcagccacctggcggcccaggggcaggctgaggtccgtgatggccagaaccaccttggggctggacatggctgacaccttcaccagttccgacacctgccacggacagacagatgctgcttgcgggacggctggtggtgggtgtgctgtcccagggggaaggaggcccctccctgctctaagggctgccccgaggccccagcaccagcaggagagccgggaaggtggtactcacggtggtgaagggcatgaactgcaggacgctgccacggccaccctgctccaggcagtccacacactcctccatgaaccactgcacgaactgggtgtgggggccagcggtgcgagaccccaggatggaggagatgagcaggaacaggttggctgtagagagtggggggagagtgacaggagggagttccatgagagtgggtgaggtcacactctgggagaaggtgggactgaaaagggaaaagaaacacatgctgagcatgtccccaaaatggggtgtcagagagagaaaatataaaaggcaattggggaggggaggagggggaactagacaggagcctgggggccaggacagccaacaatgaggggcatggagagggaagggaggggcaccgcaaggccccttccagctgacaaggtctcccagcctccatgagaagagagactcgtccagcttagccccaggttcggcagcaggggtggggaactcacccaggactcggttcagagggtcccgcatgttgaccgtgtggagctgagaggctgagagggagctgctcatggatcggtctgctgtgggacggagcagatggagcgctgggaaacagcctgccgagtgcaaaagtggtgctccccggggatgccccaacccgaccttcacccatcggaggtaactggtacatggagagcccagagaagaccctgagatcaagagcacaaagggaggccaggtacagtggctcacacctgtaatcccagcattttgggaggccgaggcaggaggatcgcttgagtccaggagtttgagaccagccttggcaactagcgagacctcatctctacaaaaaatacaaaaattagctgggtgtggtgccaacgcctgtagtcccagctcctcgggaggctgaggcagactgcttgagcctaggagaacaaggctgcagtgagccgagatggtgccactgcactccagcctgagcaacagagcaaaaccgtgtctcagaaaaacaggctgggcgtggtggctcacgcctgtaatcccagcactttgggaggccaaggcgggtggatcatctgagttcaggagttcgagaccagcctgaccaatatggtgaaaccccgtctctactaaaaatacaaaaattagccaggcgttgtggcaggcgcctgtagtcccagagactcaggaggctgagacaggaaaattgcttaaacccaggaggcggaggttgcagtaagctgagatcgtgcgactgcactccagcctgggcaacagagggagactccaactcaaacaaacaaacaaacaaacaaacaaaaaacaaaacaaaaaaagggcacagagggacctcagatacagagatcccaatggaatgagagagaaaaactaacatgtggtgagcacacagggccaggggccgatcttggtacttcctaagctgcttactcctcacaacaccccatttacagatgaggagacccagacgggggctggctcagtcgctagctaaaggtcacagcacttgtagctggcaaacctagcatctttcttctgatcaagtgtatagttggtcccctagttcctaaaaggcttcagagaaaagttcaggctcaggagaaatctctggaaacaggaaaaatgccacagaaggaacccttggcagtaagcctggcagggaggaggggacagtgaaaaggatgacctccagggaagtggttggtggggggtgtgctctttaggcaggaaggtggggagtagccccatgccccagcccgggcctctccgggcatgttttgggggaaggaaggaaggaaggtcagagctggtgagtcaatggcacaggctgtgcctgaggcagtgaactcactcacttgggtagcttgtcatcccctcaaccctggggtaagggaggggcaggagggctgtgggggaacaactgtgggctgggctggacctgggcagaggagcttcaaccctcagggagtgagaacagcaacctcttctccaggggcaggacacagagcacccccttgggggctagaacagcaggtccctgccacaccctctctgaccagctgcaaagatgcctgcagctggggcagcggcagagtggcagcatcggggagtgaattcccaggaaaaggagcggcgcgcggccagcccacacactcactggggctcgaaaggatgttggcatcgtcctcattagagctcagcagtcgcatcaacttcgaaggctgcacatcgtccagggggaagaggctgatataatcctagagggagtgaaagtcactgttatacacccctaaaccccccagtttccagctgtcagggaaaagagcttgagctccgatttgagcgaggtcagcatggctagcagggcctcagcccctctctgctcaacccctcccacaatctgacaggccccttgtgcccatgggcaagctggggccacacaaatcacccatgcagattcctgaccaatcatgcccaggcacagctgccccaagggcaggggccacaactgcttccctttgcctggggaatccttaggaaatgctgtaacaaaccggtgaacaagtgaagccggcgagggcagctggggggcctacctcaatgtcttcgcggtgtctcttcttctggcgggtggacgcctgtcccttgtgggaggagtaggaactgagggcacaccacacggccagcctggcaaagggttccagaaaaagggggacagtgagaggtgccccaggagctttctgtgtctgactgggctccccaaagcccagtctcccagggtggcaccaggcgaggggtgcttgaccctgggtggccggagcagggcaagctctgaagagaatcttacttggcaagagcagtgcccggggggtccatgaggctgtgccacttggaggagtcagtgagcaggccaggtaggatgtggcccagcaggaccagggtcacttgctgcatgtccaggcagaagatggagtagagcagctccactgcccgcagcgtgtgctccttccgcgtctccttcagcagctcctagtgcgcaggaaagggggcagttcaggagccaggggcccgggatctggggctcctacaccctgccaccccagcatggctgtccagtaaggcccgcagagggggccccagatgttgctccgcccctcaggctgaatcccagtctctggccagagctccccaaggaggcaactctgaggcgaggcattccggggaggccacctggctcacggcagcctctcagggaagcctggcagaccaggccaggtgtggggagccaggggacaggacccatgtcggcccacagccactccagcccaagtaccttaatcaggttgttgcagaaccagtagacgccgcccatgtgcagcagggtgtcaaagatgtggatggagcggctgtccacccagcccttctccagcaccttggcaaaaatgtccgtcagcacctctttgatgggccgcttggggggcagcaggttccagtagggcattgtgtccaccccggtggagggaaacttgatctgcgtggctgtctgctgcagcacgtcggcacacatgcgctccaggatcgagttcatgatcaccaccctgggggagggccgagagaacctgaggctcaggtgccactgtagggtggggagggagaggagggaacacccatgccagactttcccttggacttaggttacggaaatctccctgaggcattaacccagttttgcgctgggggacggtataccccggggtgacctggcccctgctctgctcctggcaggtctctcacctgcaggacacaaagcctataaatagggactggggagggactttcctccccctggccattccagccagatattcacattttcttttattctccaacttcccccatcccccaggcctgggccctgccaacctgccacataaataaacacaatcacttccccctaggctgagtgcttgggggtccccgcccagccctggcctcctcccaaagtaaactgttccttccaggagaggcccaagggctgccccacaggactcttcccggcccctggtagctgggcagatagaagtgtatatccaggaattttctcatggaaagaggcttcggaagtgaatacagacccgggccgagtgctgactgttcctggaatgcagggtggctctgggaaagttgctatgacctttagagccacttttcccacctgcacaatggagccacagacttctcactaccccttacccagataggatttagggtgcttagaatgggttacaccagagcaaaagctccctacttggtagggcgggggggaaggtggtggagaaatgagagaagaaaggaaaaaaggaggaggcaaggggaaaacgagatgtgcttttccagaccgtccaaacctcattcagctcaatgcttccccttctccctattaagacatcctcaggcccggtgcggtggctcatgcctataatcccagcacttcaggaggctgaggcgggaagatcacctgaaatcaggagttcgagaccagcctggccaacatggtgaaaccccatctctaccaaaaatacaaaaattagccgggtgtggtggcacatgcctgtaatcccggctactcgggaggctgaggcaggagaatctcttgaacccaggaggcggagattgcagtgagcctagatagtgccacagcactccagcctgggtgacagagcgaaacgccgtctcaaaaataagtacataaataaataaataaagacatcctcaacgttgccataaagacatggcaacacccaaaacgtattagctggtaaacacccatgttcacagcagcactattcactatagcccaaaggtggaagcaactgaagtgtccactgacagaggagggatcaagatgtggtatagccacacaatagaggtttcttttgtttttgttttgttttttgagacagagtctcactctttcacccaggctggagtgcagtggcgtgatctcggctcactgcaacctccgcttcctgggttcaagcaattctcctgtctcagcctcccaagtagctgggattgcaggcgcctgccaccactccctgctcatttttatatttttagtaaggccaaggtttcaccatgttggtcaggctggccttaaactcctgacctcaagtgagccactcacctcagcctcccaaagtgctaggattgcaggcgtgagccaccacgcccggcccacaacagagtattattcagccttaaaaaggaaggaattcctgtcacgtgctactacatggatgagctttgaggacaccatgctgagtgaagtcagtgagtcacgaaaaggcaaggactgtatgattccagttaaatgaggcatctaaaaagtagtcaaattcagcagggcacggtgggtcacgcctgtaatcccagcactttgggagaccacggtgagaggatcactcaaggccaggagttcaagacctggcaatatagtgagaccctgtctctacaaagactagaaaaattagccggctgtgggcctgcagtcccagctactcgggaggctgaggcgagaggatcacttgagcccaggaatttgaggttgcagtgagactcactctgatctgggcaagggtaagaccttgtctcaacaacaacaacaacaaaaagtataaagtagtcaaattcctagacacacaaagtaaaatggtagttaccaggagctggagggaggggaaaataggaagctgttgttcagtgggtatggagtttcagagatgcaagaaagttctggagacctgttacacaacagtgtgaatatacttaacactactgaacagtacacttaaacatggctaagatggcaaatcttatgtgttttttacaattaaaaaaagcaaacaacttattggttgggtgaatgaactcaacgtaactggtcaccagggaagtcctccaagcccctgaagagccagggcaggaaactgtcctaagaggtaactgagggtggggcatggcctgtaaaatctacagacaggttcctagctcctagacagtcacacagctttgttcttttgggagctagttgtctagaacttgagtctctgcgggcagaccctgtttagggtctgcatttctgacaacacagcaggtgctggcatataaacgcttctgccacagagacacagtacatgtttgctgagtcagatgagtgaatgcatgaataggaaagtgagtgagtgatcaagtagcgtgtttgcgaaggtcagaaaagagaggggtgcttgttattggatgtgctgacttctcacaacacacttgaagggtctgagaagggaaggcaggttaccgacctctcattgtagaactgcagggtgttctcactaaacagtggccctgccagctggcggatcatctgcagcgacttctcacgctcatccagccccagcatccggacgtgggccacaagccaagccacagcacacaccgccagactgcataccttccctttgatgttatcagtgattttctaggggagacggaaaggtgatgggctaccatctatctccctttcttgagccaacatcaccttctcagcctctgcgggcagctaagtgcagcgggtggagtcccgggccacattccacacctctctccacaagtttgatcttcccagagctacctgggccagagggagtagctaagacaacgattacacaaaatatcaatatcaaaacatgagctcctggattaaaggtcttcttgcccttacgaaatataacaagtcatcactggctggctctgtgtctcaggggagcaaacgctgctgggaaggcggggctacctggatggactcgaaggccaggaccccattctcccaggcattgaggatttccaagatggcggctgagatgctgagacaggcctcatgccacttcatctgcctgcgggtgtgcagagaagtcagcacaggggagcaaggaacgggctcagggagcgggtcttgaccctgcccccaccgccacccttggagtgggcgcccgggccactgacactagcttcatctccgaggagttgttgagcagggccaccagggactccactttggtggagtcggggcggaagcaggggtggtcagggttcaggatcttgccctcctcaggcatgcaggtctgcatccaggtctcgaagaagggcacctcagctcctgtgcgcgactcggacagaatcacctgggaaaggggaaggggggcaccagccgagtggggagggcgcggcgcctgccagcgctggacctggggctgcactgtttcccgccaggctgctgctccagcccagcccaaagactggggacgaactggtctaagggagccagacgggggcaatgctgccacctagtggtcaatgtgaacatagggctgaaggtgcctctacggactccagcccgggtgggcacctggtttctgaggcccacagaactaactggctgagaggctgcgggggcgcaggcagtgaggtggggagagttccgggttacctccttcccttgagcccccgtcccggtcgctcccctctctcacctctgaaccataggtctgggccacatggcacagcatgaggaaggagatgtcaaacagcagggcccggacggaggccggtttggctgtggaaggacgggaaggctgagctcccagacgagggcaggggggagcccgtgtctgggttgacagggatcgggatttgcctctaggaaggtcagggaccaagtggctccttcaaagctctgaggctcagaatccttttcttgagtctcaactggaacatcatcccttccttgagaccaaagacccccagcaccctctcctggcatacctaaccaagtcgtaaagggatgagggggggaaggagacacagggatggtctgggaagaatccttttccagcattatccactttcaagctctgtggaagcttccattggtcatggctctgaggagggagcacagcctccccctgttgagctggggagccctcctccctcccacactctcccgccacacccctcctcagggcccactgggcctgcggatgcacagggctgacttactgctttcttcgctgccataggttgtgaattcattcaaactgaaaggaatggagacaggctgcattgaccagggcatgagctgagcagtagctgggcgctggggctacacatgttcagagagcgatagctagagtctgagttactggttaaacttaaaatgagacacattgctatagaaaaaaggtttttgtggtttttgttttttgttttttttttgttttttttgagaaagagtctcgctctgtcacccaggctggagtgcagtggcacaatctcagctcactgcaacctccgcctctgttcaagcaattcttctgcctcagtctcccaagtagctgggattacaggtgcccgccaccacacccggctaattttttgtatttttagtagagacagggtttcaccaagttggccaggccggtcttgaactcctgacctcaggtgatccgcccaccttggcctccctaagtgctaggattacaggcgtgagccaccgcacccggccagaaggatttttattgttagaagatttccaaggcctagagaatggctcactgaatggaaccatgttctatatatgtcaaattccagggcaatcaaaaaaggcaacagaatttgagagccccttattaataactgggcatacttggaattcctccatgcccaatgttcaacacctcaacccttaccctcatctctttaccaaacatgtccactccatcctcagctgaagagaaaggaacacttaggtcgtgagaacaggcccttcctccaagatctccagccaggatgctctgcctaggcccgtgggtctctggatgagacccagacccaggcacctgactcctaccctgctacctcctcccaacgcgcagcctccctgcacgccctggggtcaggggcttggccttcctcacttgatgaatttccgggcgaaggatttcagctttccagtggcggcggcggcagccagcagcaagtccagactcttcccggacagcatgtggcccaggactcccagcagtccctccggtgacttagagtggtctgcatccatcgtctggggacaggacaggaaatcaagtcctgaagaacactgaagaccccccacccaagatacagcctagccacattttctctcttcacaacctggaatgtaatctacatctttctgacttcaatctggaaaatcattcctaaaacccacccctgctctccgatccatccctctcatctacactggcatgcaggtggtaaggttggagtgggcaaggtcacggctaggatcttctctgtcctttccttttttagacagagtctcgctctatcgctgaggctggagtgcagtggtgcgatcttggctcactgcaacctctgccccccagggttcagcgattctcctgcctcagcctcccaagtaactgggattacaggcatgcaccaccacacccagtgaattttgtgtttttagtagagactgggtttcaccacgctggccaagctggtctcaaactcctgacctcaagggatcttcccacctcagcctcccaaaatgctgggattacaggcgtgagccaccgcacccacgtctctgttgtttccatgtgagatggcctaagtgaaagcgcctactgcagtgcctggtgtacaaatgaagctcccacgggttagcattcagtggtagctgcccttgcctcccctttcactacctccaaagcaactatgtataaaagctaaaggagacagaggtctgtggcctctgtttatttatctgcaagcagatggagcactggaaagaagaaagagaagactgtggtggccagggaagggcacactcaccttgaggatgtttgtgacagtgggctccgcccggaggatcagctggatgttgggctggatgttggcattctctcccgatttctgctggggtgcgtgctctcggtccgctttgctgtggacatcaccagttggccaaggaagggaagaggaatgaagagaaattcttgacacgttccctcgttcaagcccggaaggaaatgcgcagaggaggtgggaagcatgtaagaacctccgaggttggggtgaagtttatggaagcatagtcaatgttgcaatcactgatttagcattagtctttttttttgagacaggtctcactctgttgcccaggctggagtacagtggcacgatctcggctcactgcagcctctgcctccagagtagctgggcgctcaccaccacgcctggctacttttttgtatttttagtagagacggggtttcaccatgttctactggtctcaaactcctgacctcaggtgatccacccaccttggcttcccaaagtcctgggattacaggtgagccagcacacctggcaatttatcattagtcttttttttttttgagacagagtctcgctctgtcacccaggctggaatgcagtggcgcgatctcagctcagtacaacctctgctttccgggttcaagtgattctcctgcctcagcctcctgagtagctggaattacaggtgcataccatcgcgcctgattaatttttgtatttttagtagagatggggtttcaccacgttggccaggctggtctcaaactcctgacctcgtgatccacccgccttggcctcccaaatgctgggattacaggtgtgagccaccgcagccggcctatcattagtcttaaatgctctgaaagcacatttaagattaaaggaagattcaggatttttatttatttatttattttttttttgagacaaggtctcactctatcgcccaggctggggtgcagtggcatgatttcgcctcaccacaatctccgcctcctgggttcaagcaattctcgtgcctcagcctccagagtagctgagattacaggcacacaccaccacgcccagctgatttttgtatttttagtagacatggggttttgccatgttgggcaggctggtcttgaactcctggcctccaagtaatccacccgcctccagcctaggatttttacttttatcacaaagatgggtatgagttaaagagcagtgactaagagtgtaaaactctggtctgaagacatctgtgctttcttttccttcctgttccctgtacccccaggcacggtcccagtcacttgcagcccaaactttcgacaggaggttgaaaggcacgcagcagccccaccgtaacaagagagaggtcaaggggctcttggggtagcacaggtgcgttcacacttaccgcttagccataaggttgttgacgctggcctcagacagaagcccctgcttgccacattcttggagcaggaagtttgtacagtcacagctgtgagggagaaagatgctgagggaactgggcacctggataggatggtgaggggtgggagtggcaggtccctgagcagcatcctccctctttcaggatgaggaaaatctggagtgcctgagggacggtagaggggctctggggacttggcaactgtgggctcctatttcctgcccctgccaaggggagtgaacaaggagacagagtcccctgaggcttctctggcacagagatcaggggaagagcccagaacgccttccagtagggcgggggtgaccaggggagctcatacttgcagcgctggtcagctttgtccaacaagggggtgagcttcagcaggaactcaaaagcacagttgacatcctcagtgaagtcctagaaagaggcagaagtgtccatctggtttccagggccaccaggccctgatcatctcaggcaaccttgtctgctggaggcatcggcctgagttgcctggctgctttctgcctggagcctgggtgtatgttgtgggtgcacgcagacgctgaagcacacacactggctgaagcacacgtacacgctgaagcacacacacgctgaaacacacacactgaagcacgcacacactgaagcacacgcacatgctgaagcacacgcacatgctgaagcatgcacattgtgaagcacgtgcacgctgaggtgtacactcacatccggctctcttccaggcatgagaacactgcccagctggggcctgaaggaccctcccctttgcccttatttctgctcccatgcctccatctcaatccccaactcaccttgtctccatgagagtacttcttcaacttcaccaaaacctgtggaatctagggggtgaggcagggggaaaaacaggaagatccatttcttttctctttcatctacccctgaaggcatccccccgaacccctgctccaggaagagagacaggaacactcctaccctgggagtgagagcacacttagtgctaaatgagaaagccaataggtgcccaggcccctgatgcccccaggcctaggcacaggacacaagcaccctgcacctccgctagctcaacagaaaaagatgccataagcaaaagtggatccccagcttcaaggaggactggggcccctttccctggctccctttactgccctgcacctatctgtctgatgaccaagctaaactgcacctctgtggtaagaaacaacggagtctgccaaatgggctaaatatagccctggcactttcagagaaaatgatcaatgggaacttgcactggaatacctggcaggctgggcccagtgcccgcagggaggaacacagggcaaaggtccagggtgccactggtcttgctaagaaccattcctagactggctctgcccctcccacgtccccagtaccttgaggaaagtgaaagctgtccacttgagctcctccgtaccctcgggagactcaatgagccccacgaagcaagctttccagatctccaggacaaaaagtggggtggggatatgctgtgggaagagccaaggatgaggcctaagagggtgcccataccccgtcacccttctgtggactctgaggatttggctgggtcagagactgcatggcagagtcactgctcagctatgtgctgagaaccaggggagtaaggtccaatgacagaagtgtgcacgactggcacccactttccatcatggagcaggagaaaccccacttctcccagggagaaccagaagaatcctccctcctgcccccaacaggctggcctgccttggagaagggagagccactcggcccctcccacctgcatgcgcttcaccatcgtcagctgctccaccagggactgcgtctcgcctgtcaggttcatggtgccctcgagcaggatcacggcgtggacagtggggaagccggtcttgtgcatctgctccgcatgcacagacagcatcgtggggatgctgaggggtcacaaacacaggggacggtgtttggggggccaaaggtgaaggcggagaggatggcacgggtgccacatcttcctaccccagggcgtgtcctccctctcccttctccaccatcccccagggagccggtacctcctaatgagggtgccacactgctcggcctgactccggagctgcgggttgctgagattggccaggatctctccaagtttcaagagagaatgctcgatggcagtccaagaagctggcagagggaaggaagtacagaaacatgatgggaaacaggagagaaggagcacctggccctgaactcctcgattttggcactccctccggcacacgaaaccacacaggaaggcttcccctgaggacaacagggagggaggggcctgagggcagcatgcactgtttccagaaggggggtgggcacctagagctggaaaccccagagaccattcccaaaagcctgatttccaggggacacagccagctgacttcagaaggtatggcatcacacaggctcaggagagagaggcagagggaggccagaatccagtggctggaacagggagggcggccacaaatcactcgaggagtgagcggatcccaaagtccagtcttgcagaggctgtcactctcctctgggggaactgggtccctaaatggctttctcattctcaaccactccctcatctaggcattgcgtttgctgccctcccctgctgaaggcctcttacacactctctctcaaactcccaccatgctctaagcttctgttcaagccccagttcctttagcaactcacccgactggtctaactcactgttctctccttaatgcccacactcatggtctaagccatattggttagcactgaactataagttacttatcctagttacaattccagagggtcaaatgatgaataatggcaccaactagcccattaacctccatggagcataaaagggggaaaaaaagacaagacctgagatccattaaaattcagtattcatccgattttcagccaataaacatttatcaagggcccaaggtagggaagaggctgtcaacacagtccatttttatataaagattgtctttttggacttttcacaggcagtaaaacatacttggggaagaaataaatatactagtcctaaaacaagctctccaaccaggtcctgaagcctcgagagtagcccattctagcattcttgttcctggagaacaagagacctgtaggtggtcccaagccacttgggcttcaaggagcaagactatggccttaggaccccattgctggaaatactggcatcttccctcccgccaggtgatctgtctgttctcaggctctggaaagtacccaaacttaacatctgaacttgagtcaagaggcatatggtacaacaggcccaacagcagacaggcactgtgttaaaaggggcattttaggtaacattcaaatacaagagtcatctgcttccaagcgatgagtaacatggagacaaacacaataatggacactgtgcttgtcttgtcctctagttttttcctcgtctgtgatgtactagtcttgctacccactagcagctatgcttgatgagggcagggaccctgccacatgctcctttggtagccccccaccccccacccccagcacctagcacagtgctgggtatacaacaatgctcagtaaatacctgttggttgattggctcgggtgccaccctgcccaagtccctgggatgtgtgcaatgcttatggggagaaaaaaaaggaagtgggatggtttcagatcctcctggaaagaggtgggatggcatcctgcctctcccttctcaattaaaggaccggctatgggagcagcggcaggtggggctcaggggaatcaagggacatacaggcctcctctagtttggcgatgtgcagcagggcccggttcttggtgctgctgagggttttctccaggcgctgaaggcacatggcaagctgcttctccccagcggctggagtgccggcctccagcccctcccgcagccgctctgcagaggctgccgtgcagcgcagcagccagtggagggcgctaagaagggctcggcacagtccgatgcattcctctgctttgccgtgacagctacagggaaggatgcaaaatcagactctgttcttccaatggctgaaatccgacccacatcaatgttccccagagtccctggcactcccctactagggactagggctgagaagctagcaaagtcctggggaagatgcttagcccctttggctcctactggacaagatttcaaatgagctactccagacagagaggaggcactctgtcctaagggagtaagaaaaggagggcacaggtaagtgtagatgggcaggtggggagaaaaaacgttggaacccggagttggtctcggtctgtgtgctaggagctgcacctctgcacaaagacaaggctggaacattgtattgtgagcccccttacccctgcccttacctcagacggtcacaaaacatgtccatgatgtccagcaatgcctggacacacaggtcccgagaaaagtcatcaaactgtggaaaggacagtggagatgctacggaatgcctccatccacccccaggtctcacatgaggcagacggtgcattcaggactcctgctcctctctcctccaaccctgggttccagactcagcatcctcaacactggacattggctcccaagcaccagcccctacttgccaggatccccctcccatggaagtccagcaatgccagccagaggcatcatgtgctgcctatccagcctcacgggtcacagcatcagggccgtcaaggaggcggggccttgtctgtcatccccaatctagctcctgagtgtctatggtcataccttactgatggctgtgaggacagaagagtaggacaccatctggagagaaggaagaaagataatctttagacaactagtctcccacagttgagaggaacaaacactgatgcttcaagttgctgcagctctcctgaacctcaaccccttccacaggccctcttcaacccaagcaaggagaggcagtgtcactgtgcactgccctgttcctgcctctgtcagacttactgcaaatggtatcagcataagcccatcaagaagatgattctggggatgctcaaaggctccatgtttcaggccgagcatggtggctcatgcctgtaatcccaaaactttgggaggccgaggcgggcggatcacgaggtgaggagtttgagaccatcccgcccaacatggtgaaaccccgtctctactaaaaattaaaaattagctgggtgtggtggtgcgtgcctataatcccagctactcaggaggctgaggtaggagaatcgcttgaatcagggagttggaggttgcagtgagccgagattgtgccactgcagtccagactgggagcagagcgagactctgtctcaaaaaaaaaaaaaaaaaaaagcgcctgctactcactgtcctcaataagcatgggttaactgacggctagtgggcagaagcatgggcaagagtgaagccatgtcactgtattcctacagcttccggcaagaacagaggttttaatgggtaagaactagagacaaacaaacatttcctgcactgagcaggtagtacctgcaccttgaaacagggagtggctgggcgtggtggctcacgtttgtaatcccagtactttgggaggctgaggcaggattacctgaggtcaggagttcaagactagcctggccaacatggtgaaaccctgtctctactaaaaatacaaaaattagctgggcctggtggcctatgcctgtaatctcagctacttgggaggctgaggcaggagagctgcttgagcctgggagacggatgttgcagtgagacgaaatcttgccaccgcactctaacctgggtgacagagtgagactctgtcaaaagaaaagaaagggagggagagagagagaaagagggaaggaaggaaggaaggaaggaaagaaggaaagaaggaaagagtaagttttactgtacaaactcttatttgttctccagaacttactccctaggacccatccaggacaccttccctgatcaaccccaacctcccccacaaagctgaaacccttcctctgtgctccaagtaatcacctaaggctcatcattacacggcgggtgcctgcagtccccactaaattagaagctccttgaggacaaggatgcttttactcagtgaccaccacaaacttgatgtttgtagaatgaataaataaaaacacctttagctcagcatgtctcaaagtagcttccaaagctgccctacccaatacacaagtcactagccccatatggttatttaaatttaaattaattaaagttaaataaaatttggccaggtgtggtggctcacgcctgtaatcccagcactttgggaggccaaggcgggaggatcatgaggtcaagagatcaagaccatcctggctgacacggtgaaaccccgtctctactaataatacaaaaaattagccgggcatggtggcgggtgcctatagtcccagctactagggaggctgaggcaggagaatggcgtgaacccgggaggcagagcttgcagtgagccgagattgcgccactgcactccagtgtgggcgacagagctagactctgtctcaaaaaaaaaaaaaaagaaatgtcacacacataccctgagcttgtgtgtgacataaatttgagaaacactggattaaacatataacgagaactttaccacagaacttctcggaaccatgatatactcgtatacaatgagaatctctaagaagactgacgataaaacaaagcaatatcctttaaacttacttgaccaaggaatttcatgtacccagtatttccaaaatacattttgggaaattctacctgaacagtaagttcccagaggacagagatggtattgaatttatatctgtttctctagcatccagcccaagaactgatacacaataggtcctcaggaagtttttattgctttgaacagatgaattctactaactagttgccttctggaaaaatcttaccttaaaataaatttctgttagtaaaacctattcatcaccatcataagactggatatctagttcagctgtctctgctggaggagtggaagcctccaaagatttaagaagaaagctgtcggccgggtgcagtcgctcacgcctgtaatcccagaactttgggaggccaaggagggtggatcacggggtcaagagatcaagaccatcctggccaacatggtgaaaccccgtctctgctaaaaatacaaaaactagccgggcgtggtggcgcatgcctgtaatcccagctactcaggaggctgaggcaggagaatcgcttgaacccaggaggcagtggttgcagagagccaagatcgcaccactgcactccagcctgatgacagagcaagactccatctcaaaaaaaaaaaaaaaaaggagaggaagaaagccgtctgctcaatcacctgggtttggcaaactttccatccatgtgcaatttccctctcaccaaaatacactgctctgttcagccatctttcactagtactcctgggtgaacaggagcaaaacacagagggcttaaataccatcagtgttcagaaccaccatactgtgaggccagggctagtgtctgatatccatcagaaagctgggagcctgcctgggcaggatgaccataacgttccggcgagcgttttgtttatttataactgatgtccccatagcgagtgcttggcaaagaagtgaaccttgctggataccaacctgcagggggagctggatgtccccactgaacactgaccctcaaatgccgggagagaaacccccaattatgcatgttccgagggatgccattcgtcaaaatgaatttatggtcttcaaattctgaattctgttcagcagatttctgctaactgtatcaataaagcacggctacttcagagacccaaaaatgctttctacatgacgaactgttttacacagcaggatctggcctattcaagtcttaatcattctatcacagtagaagctctaaaccaccacaggcccccagggcaggagaccctctgtgtggccaccatgcttgtggctagccccacctgaccctgcagctgctctcaaatcctctctgctcttctgaatattcaacaccccaactactcctaagtgccctctactcgcataacattgggccaaagagcctcttgactctgaaggaagaataaattactaattttgcacagcacttgagagggcacaaaggtctttcatatctatttacttctgttacttcagcctctttctctttcttccctttcccatcagtgtttatacatctcaagactcttctattggtctgtttgttgtttgagacagggtctcgctctgtcacccaggctggagtgcagtggtgctcccggattcaagcaatcctcccacctcagcctcctaagtagctgggactacaggtgcacaccaccatgcttaattttttttttttttttttttgagatggagtcttgctctctcgcccaggctggagtgcagcggcgagatctcagctcactgcaagctctgcctcccgagttcacaccattctcctgcctcagcctcccgagtagctgggactacaggcacccaccaccacgcccggctaattttttgtattcttagtagaagcggggtttcaccatgttagccaggatggtcacgatctcctgacctcgtgatctgcccacctcggcctcccaaagtgctgggattacaggtgtgagccaccatgccaggctaattttctttttttgagacagagtctcactctgttgcccaggctggagtgcagtggcacaatctcggctcactgcaacctctgcctcctgggttcaagcgattcttctgcctcagcctcccgagtagctgggactacaggcacgcgccaccatgcccggctaattttggtatttttagtagagatggagtttcactctgttggccaggctggtctcgaactcctgacctcatgatccacctgcctcggcctcccaaagtgctgggattacaagcgtgagccactgtgcccagctgcctgactttcgtattttttgcagagatggggttttgccgtgttgtcaagggtggtctcaaattcctggtcaagtgagttgcccacccacactggcctcccaaattcctgggattacaggtatgagcctggcctagattcttctatttttaaaagagtttcctatagaccccacacttccatttaaccaccaccccatctctgctactcttcacacatataaaagtttttttttttaattttattttcttttttttttttgagacagattctcactctgttgcccaggctggagtgcagtagcgcgatctcggctcactgcaacctccacctcccaggttcaagcaattctcctgcctcagccacctgagtagctgggattacaggcatgcaccaccacatccagcttatttttgtattagtagagacagagtttcgccatgttggccaggctggtcttgaactcctgacctcatgatccactcccttggcctcccaaagtgctgggattacaggtgtgagccactgaacccggcctttttaattttacttttttagtagagatagggtctatgttgtctaggctgggctcaaactcctggcctcaagtgatcctcctacctcggcctcaaaaagtgctgggattacaggtgtgagccaccacgcccggacaacataagagtcttctacactccctggctctacctgcacaccttccattgactattcaacgcactccaatcacttctgtcctgaccactctatgaatcttctcattaaggtcattgacaaactcttcatgttaaacctaatggatccttctctgttctgatcttacctgacttcccagcagcatctgaccccttgaaacattccctcacccctcaatcctctcttggcttttcttgataacactctcacttttcttccctactctctggccccttctcttcagactcctatgaggaattatcctcctaagtgtgttccttaaatgagattggttcctcaggaagttgggtttagtcacttctttgctcactctccctgctgtctctgcacaatctcatccatgcccatagctttgattaccatcagtagctggtgacttctaaaccaaaagctccagtctagaactctccttttgagtaccagacacgtatgttcaactgcctaccgagtatcctctttttgataccccacagtcttcttaaatttaaaaggccaagatcaaacatgtatcctcacccacatcccaaccctactctgctcttccactgtctcatgatccatcagctatctaatgtccaaaccagaaacctaagcgttatccttgaccccttctcctctctcactctgctcgtcccattaatcaaattgtttcaatgccacttcctaaactgttcttaaattcatcatttttttctgctgccacttcccaattttgtgctagtatcatttctcgcctgaattacagcaagagcctaaatcaggggttggaaaactacagtctgcaagtccaatttggctcatcactatttttcttaatcaaattttattagaacacagctatacccatttgtttacagatgggctatacctatttttgagctgtaatgacagaatagtgatgagagagaccattcagtctgcaaagctgaaaatacttactatctgggtcctttaaagacaaaatatgccagactcaatgatatccccatcttctgtcttacctccctccaactcgttcttcaaactataaccagagtgatctttttaaaattaatccacaaatgtccctaattaatctacaaagtcaaggaaatctggattaaaatataataggatttttatggtaacttaacgaattgattctaaaatttgtctggaaatgaaatgtctgaaaacagccaaaaaaattttgaaaaataaagaaactaagtgaagatttgtccaccaaggtatcaaaacatactataaagctctaataaagttctggtgcaacaaaagagaaagaggccgggcgcagtggctcacgcctgtaatcccagcactttcggaggctgagacagatggattatgaggtcgggagttcaagaccagcctggccaagatggtgaaaccccatctctactaaaaatacaaaaattagctgtgcgtggtggtgggcatctataatcccagctacttgggaggctgaggcagagaattgcttgatgcttgaacccaggaggaggaggttgcactgagccgagatcgcaccactgcactccagcctggaagacagagtgatactccgtctcaaaaaaaacagagaaagataccaatgaaatatactagggtgtcaaaaaatggacccttgtgtacaagagaatttaaaatttaagatatgacaaagaatggcctattcaataaagacagttgagccattatccatctatttgaacaaataataaatgtggatcccatcctcataccacaataaattctaaatggatcaaacaaagtaaatacaaaaaataaaagtccagtgttggcagaaattagagaatatatttttcattttattacgtatgtatgtatttatttattttgagataggatctcactctgtcacacaggctaaagtgcagtgatgtgatctcagctcaccgcaagtgcgcctccgcggttcaaaggattctgctgcctcagcctcccgagtagctgggattacagatgtgcgccaccatcagctaatttttacatttttagtagagacagggtttcaccatgttggccagactagtcttgaactcctaacctaaggtgatccacccacctcggcctcccaaagtgctgggagccaccacacccggcctgttgttaataatgagattttcccttcagatttccccttcccagatcccgttgtctcagactgatgggattttctccacagcctcttgactggctcaccaattgttgtgctggacccctattcactagggatggcaccaggttcaagaggctgaagggacctggagacagcagatgacacatagggttttgctaggcggaacttatatgcagggacagtccaggggtggtgggctggacaggagaaccgcctgtaattttttttcttagtatgcagaaattttttatgtttttgttgtcagttttatcctttttttcccttactggacttttgtcttccttaaggatttttctgcttcaaagatttaaataagccaggcgcggtggctcacgtctgtaatcccagcactttgggaggccgaggcgggcggatcacgaggtcaggagatcgagaccatcctggctaacactttcgtgaaaccccatctctactaaaaatacaaaaaattagccaggcgcagtggcgggcgcctgtaatcccagctactcaggaggctgaggcaggagaatggcatgaacccgggaggtggagcttgcagtgaaccgagatactgccactgcagtccggcctgggcagaagagcgagactccatctcaaaaaaaaaaaaaacaaagatttaaatattaggttcgagacccgcctggccaacatggagaaaccctgtctctactaaaaatacaaagattagccgggcgtggtggcacccgcccatagtcccagctacttggaggctgaggcaggagaatggctggaaccggggaagctaaggttgcaataagccgagatcacacagctgcactccagtctggatgaaggagtgagactctgtctcacaaaaaaaaaaaaaaaagccgtaacaaaaaaaaaaaatagaaaaataggcaaattatatatttatttgtgtatttatgaatacataaattatgtattcataaatacataggccgggcgcagtggcttacgcctgtaatcccagcactttgggagtccaaggcgggtggaccacatgaggtcaggagcttgagaacagcctcgctaacatggagaatccccgtatctactaaaaatacaaaaattagctgggcatggtggcgcatgcctgtaatcccagctactcgggaggctgaggcaggagaattgcttgaacccgggaggcagaggttgcagtgagccaagattatgccactacactccagcctgggcgacagagggagactccatctcaaaaaaaaaagaaagaaaagaaaatgcacattataatatgatataattatttgcctctggaaaaagttttaaaagattctggccaggcgcggtggctcacgcctataatctcagcactttgggaggccgaggtgggcggatcacgaggtcaggagatcgagaccatcctggctaacaagatgaaacgcatctctactaaaaatacaaaaattagccaggcgtggtcgtgggcacctgtagtcccagctacttgggaggctgaggcaggagaatggcgtgaatccaggaggtgcagcttgcagtgagccaagattgcaccactgcactccagcctgggcgacacagcgagactccatctcaaaaaaaaaaaaaaaaattatatccagcgttggcaaaggtatggggaaatactgtcagacattacggatggggtataacctaatccaatcattttcagggggaaatttgcaggatctactataatttagtatgtgtatattcttcaaatcagatattccattgtgaggtatccaccctagagaaatacttccagatatgcagacaggtaggtataaggatattcagtgaaacattgattataacagtaaaaaattacaaacaacctaaattaaagtacatatgggctgggccaggcacagtggctcacgcctgtgatcccagcactttgggaggccgaggcgggcagatcacttgaggtcaggagtttgagaccagcctggccaacatgatgaaaccctgtctctactaaaaataaaaaaatgggccaggtgtggtggtacatgcctgtaatcccagctacttgggaggctgaggcaggagaatcacttgaacccagcggcggggacaggaggaggttgcagtgagccaagatcgtgccactgctctccagcctgggcgacagagcaagacttcatctcaaaaaaaaaaaaaaaagtacatatggaatattatgtagcagtggtttaggggtgagctccatggctcacgcctataatcccaacactctgggaggccaaggtgggtagattgagctcaagagttcaagatgagcctgagcaacatggcgaaaccgtgtctctacacaaaatgcaaaaattggccgggtgttttggtgcgcacctgtagtccaagctacaggtgcaggaggatggcttgagccaaggaggtcaaagctgcagtgagccactattgtgccactgcactccagcctgggcaacaaagcaaggatcctgactctacacattttgttttttttgagacagagtctcgctctgtcaaccaggctggagtacagtggttcgatcttggctcactccaacctccgcctcctgggttcaagtgattctcctgcctcagcctcccgagtagctgggactacacgtgcatgccaccacacccaggtaattttttgtatttttagtagagatggggtttcaccatgttggccaggatggtctcggtctcctgacctcatgatccacccgcctcggcctcccaaagtgctgggattacaggcgtgagccatcacgcccagcctctaaaaaaaatttttttttttttttttgagacggagtctcactgttgcccaggctggagcgcagtggcgcgatctctgctcactgcaagctccgcctcccgggttcacgccattctcctgcctcagcctcccgagtagctgggactataggcacccgccaccacgcccggctaattttttgtattttcagtagagacggggtttcaccatgttagccaggatggtctcgatctcctgacctcgtgatccgcccgcctcggcctcccaaagttcctgggattacaggcatgatccactgcgcccagcctaaaaaaatttttaataaaaaaaaatatatatgtgtcaactgagaaatactattcagcagttaaaaaataagaagaaaaggccgggcgcggtggctcacgcctgtaatcccagcactttgggaggccgaggcgggcggatcatgaggtcaggagatcgagaccatcccggctaaaacggtgaaaccccgtctctactaaaaaatacaaaaaattagccgggcgtagtggcgggcgcctgtagtcccagctacttgggaggctgaggcaggagaatggcgtgaacccgggaggcggagcttgcagtgagccgagatcccgccactgcactccagcctgggcgacagagcgagactccgtctcaaaaaaaaacaagaagaagaagaatgaggccaggcatgggtggatcacacctgtaatcacagcactttgggaggccaaggcaggaggatcgcttgagcccaggagtttgataccagcctgggcaacaaagggagaccccgtccctacaaaaatgtaaaaattatcagcctgggcaacataggaagatcccatctttacaaaaaaatttaaaaattagccaggcatggtggtgcatgactgtagtcccaactccttgggaacctgaggtaggaggattacttgagcccagaaggatgaggctacaggaagctgtgatcctgccattgcacactccagcctgggtaacagagcaagaccctgtttcaaatttaaaaaaataaataaaaagaatgtactattaacatatacaacataaataataaatctcaaaaacatttatgttaaacaaaagacagtatacgaactatatcccatctgactacattactaagaaatccaaataaaggcaattgtgggagaggggagtggactagaaagcggtaaaagggaactttctgagagaacagaaatgctctgtatcttattttggatgctggtgacatgggtacatacaattgctaaaactcactaaataggccaggcgtggtggctcatgcctgtaatcccagcactttgggaggctaaggcaggtggatcacgaggtcaggagttcgagaccagcctgaccaacatggtgaaaccccgtctctactaaaaatacaaaaaaactggccaggcgtggtggaggacacctgtaatcccagctactccggaggctgaggcaggagaatagcttggacctgggaggcggaggttgcagtgagctgagattgccctactgcactccagcccaggcaacagagcgagactccatctcataaaaaaaaacaaaaaaacaaaaaacaaaaaacaacaacaaaaaaaaaaccctgactgaattgatcttaagatgtttgtatgttctgagacgaagttttgctcgttgcccaggctggagcacaatggcgcaatctcggttcactgcaacctccgcctcccaggttcaagcaattctcctgcttcagcctcctgagtagctgggattacagacgcccaccaccatgcccggctaatttttgtatatttagtagagacggggtttcaccatgttggtcaggctggtcttgaacttctgacctcaggtgatacactcgcctcggcctcccaaagtgctgggattacaggattgagccactgcgcccagcgcaagatctttgtatgttatgctatgttaattaaaatatgtatatttttacggaagtcttgtcatgtgacgcctccacttaaaaccctttaaatgattatttgtcaccctaaaataaagtccaaattccttagcatcactcaaaagtctgttacaatcttatcattctctctccctaaaccactctcctccttaaagtgccagcctagcagttctaaaggtacggttcaggaactccccagggtccccaagacctttcagggggtctaggaagtcaaaattatttttaaaatactactaagatactgtttacctttttgctctttttctctcacaattgtacagtggattgtcctggaagctccataacatgtgagaatatgatattattaaatgcatcaacaactgtaatatctatataacttagtcatggatattgtccaaattaccaattcatgatgtgacaaaaatcatgcatagataaaagatctattcaaggtgcaacaaagagaccagttaattttatttcattttattttttattgagacagagtcttgctctgtcacccagggtggagttcagtggcatgatgttggctcactgcaggctccacttcccgggttcaagcgattctcctgcctcagcctcctgagtagctgggattacaggtgcgcaccaccacacccggctaattttttgtatttttagtagagacagaatttcaccatgttgaccaagctggtcttgaattcctgacctcagatgatccacccacctcagcctcccaaagtgctgggattacaggcaggagccaccatgcctggccaataatatatatgttttaatatttgaagaaatttattctgagtcaaatatgagtaaccatggcccttcaggaggtcctgaaaacatgtacccaaggtggtcgggtgcagcttggttttatacattttagggaggcatgagatcaaatacaatcaaatatatttaagaaaagtctcaaaattttgaagactgtaaaggggtccagggactgagcacagtggctcatactcataatcccagcctttaggaggacaaggaagaaggattacttgaggccaggagttcaagaccagactgggcaacatagtgagaccccgtttccacaaaaaatacaaaaaaagaaaaaggagaaaaaagaaaagaaaaaggggtcctgagagcaaactccttttctctagccataccaaattattttcagttcctgaacaacattatgtgatttttgcctcccaccgtgtacatatgcttttctctgctttgcacacacactctcctcaatgtgccggctaactcatactcaacattcaggtcttggtttaaacatcacttcctccacaaagccttccttgattgttcacactggactgggtgcctttcccatgtattcccatagcaaggacagtcccaacttaacaatggttcaccttacaattttttgactttattttttaattttatttattttactttttgagatggagtctcgctctgtcaccagactggagtgcagtggcacaatcttggcttactgcaacctctgactccctggttcaagcgattctcctgcctcagcctcccaagtagctgggattacaggcactcgccaccatgcccagctaatttttgtatttttagtagagacggggtttcaccatgttgtccaggagggtctcgatcgcctgacctcgtgatccgcccacctcggccttgcaaagtgctgggattaaggcgtgagccaccacaccccaccttaatttttcgactttatgatggtgtaaaagagatacacattcaggctgggcgtggtggctcaagcctgtaatcccagcactttgggaggccgaggcagatggatcacttgaggtcaggagttagagaccagcctggccaacatggtgaaaccctgtctctactaaaaatacaaaaattagcggggcatggtggtgcacgcctgtaatcccagctactcgggaggctgaggcagaagaattgcttgagcccaaggagatggaggttgcagtgagccgagatcgcaccactgcactccagcctgggggacaagagtgaaactccgtctcaaaaaaaaaaaaaaaaaaagagagatacgcattcaggtcaggcacggtggctcattggaggccgaggtgagcggatcacctgaggtcaggagttcgagaccagcctggccaacacagtaaaaccccgtctctactaaaactacaaaaattagctgggtgtggtggtgcatgcttgtggtcccagctactcgggagacaggcagaagaatcacttgagcccaggaggtggaggtcacagtaagcagagatcacgccactgcactccaccctgggtgacagagtaagaccttgtctcaaaaaaaaatatgagatacacattcagtagaaattgtacttcaagtgctcatacatgtaagccattatcctcagtgaaataactgaggaatagaaagtcaaggaggttgcagtgagctgagatcagccattgcactccagcctgggcgacagagcaatactccgtctcagtaaataaaaaaaaagtcaaataccacatattctcactgataagtgggagctacacaacgtgtgcacatatagagtgaactaacagacactggagaatataaaaggtgggaaggtgggagtggggtgagggttgaaaaattacgtattgggtacagtgttcactactagggtaatgggtatactaaaagcccagatttcaccacgatgcaatgtatgcacataagaaatctgcacttctggctgggcgtggtggctcacgcctataatcccagcactttgggaggccaaggcaggcgaattacctgaggtcgggagtttgagaccagcatgactaacgtggagaaacccagtctctactaaaaatacaaaattagccgggtgtaatggcatttgcctgtactcccagctacttgggaggctaaggcaggagaatcgcttgaacctgggaggcagaggttgcggtgagccaagatcgcgccattgcactccagcctgggcaacaagagctagactctgtctcaaaaaaaaaaaaaaaaaaaaaaaattttgccaggattggtggtgggcgcctgtaatcccagctacttgggaggctgaggcaggacaattgcttgaacccgaaaggcagaggttgcagtgagccaagattgtgccactgtactccaccctgggtgacagagtaagactccttctcaaaaaataaaaataaggctgggcggccgggcacagtggctcacgcctgtaaacccagcactttgggaggccgaggcggaaggatcacgaggtcaagagatcaagaccatactggccaacatggtgaaaccccatctctactaaaaatacaaaaattagctgggcatagtggcacacgcctgtagtcccagctactcaggaggctgaggcacgagaatcacttaaacctgggaggcagaggttgcagtaagccaagatcacgccactgcactctagcctagtgacagagcgaaactctgcctcaatcaatcaatcaatcaataaaaaataaggctgggcgtggtggctcatgcctgcaatcccagcactttgggaggccgaggtgggtggatcacctgaagtcaggagttcgagaccagcctggccaaaatggtaaaacctcatctctactaaaaatacaaaaattagccgggtgtggtggcagacgcctgtaatcctagctactcaggaggctgaggcaggagaatcacttgaacccaggaggcagaggttgcagtgagccgagatcaagccattgcactgcagcctgggcaacaggagcgaaatcccatctcaataaataaacaaacaaacaggctttgtgttagatgatttttcccaactgtaagctagtgtgttctgagcacatttacggtaggtagatggccaggcacggtggctcacacctgtaatcctagcactttgggaggccaaggcgggcggatcacaaggtcaggagttcaagaccagcctggccaatatagtgaaaccctgtctctactaaaaatacaaaaattagccaggcgtgatggcaggcacctgtagtcccagctactcgggaggctgaggtaggagaatcgcttgaacccgggaaacggaggttgcagtgagccgaggtcacgccactgcactccagcctgggcgatagagcaagactctgactcaaaaaaaggtaggtagatgacctttggcaagttatgtgtattaagtacattttcaacttatgagtggtatatcagcacatcaccccattgtaagttgaggagcatctgtactctatcctaacctttatcataaacccatctagtgactgcttatttacatgtctatattacccactaaattttctgtgtactgacatcgggttttgttcacagctatattccccaggggctaagcactgtctggcacataaaagcattcatgagtatttgttgatagaataggtgaatgtaatcctctttttttcttttgcttgttgttgtttttaatagacggagtgttgttctgttgcccaggctggagtgcagtggcacaatcagtgctcactgtagcctcaaactcctgggctcaagcaagcctcctacctccaccttctgagtaggtggggccacaggcctgtgctacctgctaccactcccagcagaataagtgaatgtaatattcatcacaacaaatgaagtattatttttatgagaacactgaaactcactgaaatgatctgttcaaacagatcaatctagaatcttactctttcatctagaaagagtaagctgacaattgtacaactgcaccccaaattgtgtttgtttgtttctttcctgagacagggtctcactctgttgctctggctggagggcagtggcaggatcatggctcattgcagtctcgacctcccagggctcaggtgatcctcccacctcagccttccaagtagctgggactacaggggcaccaccacgcaggggtaactctttgtatttttgggtagagactgggttttgccatgttacgcaggctggtcttgaactcctgggctcaagcaatccgcctgcctcagcctcccacaatgctgggattacagccatgaaccaccggggcccaaatgcactccaagttttttacccccagaactctcacttcttggtgggggtttgcgggaagcttacctgggaactaatggcatacttcaggtaggacaagatgagaggattgggggatggtccaatcatggcctgctctagtaacgcatctgcaagaggaatagcaaaacacaactgagtgattacaacttctctgggtttatccctcccatctttctttcccagttcacttgagacctgccaggttgagaatatcccaggtggctcctttaggaaagaatttcttcatgttgattgcccattggtagtcactccagcgctccttccaggcttgcaaaatggcttgcttcaggttgaccaccttcattatttcactctgagcaggtggcagcggtggcggccagctttgaggtgaaagaaatggagctaaagaaaaggacatgaggttctaaggagaaccggggaaggcagaattaaatagaaaggagaagatgcgggaagatttaagcgagacagaggaatttgaaagaaaaagagctaaagggataaagtaagatcctgtcagactctctcctcctgaaccgcccttccttaaactggggcactaagaaagtatcggccgagcgcagtggctcgcacctgtaatcccagcacttcgggaggcagaggcgggcgaatcaccggaggtcaggagttcgagactagcctgaccaacatggagaaacctcgtctccactaaaaatacaaaattagccgggcttggtggtgcatgcctgtaatcccagctactcgggaggctgaggcagtagaatcgcttgaacccgggaggcggaggttgttggggtgagccgagatcgcaccattgcactccagcctgggcaacaagagcaaaactccgtctctcaaataaatgaataaagaagtatcaaagggactaatagattaaacagggcatcaaggagttaaggcagtcctggttgcctaattacgcccttagctctaaaagcgtcccttggccaccaccattccaagtccagatttgctccctcatttcctccaccttctccagccctgtaactatacctcccaatttccttttcatccaccacctccccaaatttaagcctaccgcacaatccagttctaggtggtaggcatcgccattttggcacttgtcaagaagctcactttctattggctgggagtaacaaacgccaaccaatagaaatgcagcaaggaacgccccgctgtcttctgggaatggtagttccttggactgaaaccgtatttgtctgcgccggcgaggaaactaagggactcgtctagtcggcccgcattgttcttctcctttaagggaggacatccaggagctgaggcactacagagactcagggactcgagggagctcgaaaggccgctcacaacccggcgtcgcccacgacgtcactgtcgaccgggcttctccatcatattccgacaccctttcattcgttagcccctagttagtaggtgcggcaagggtgtggcgtgggggcaagggtgtggcgttcagcaataaggtctttctcctttcctgggctctttctgttctcctaagcccctggagctaccagagctattctcatttccacaactatattctaaaagcgacaccgaggtgccttagttgcacacatatcaccgtccccgaatcttacagtcctatcagaatctccaggccctccatacagcttggatacaagggaaagtaaagaggaaactaaggtgaaggtgatcaaaatcaaaggaattctgagaaactgtcacaactaagagggctaaggagacctgatgactaaatgtaatgtggttttctgaatgcgatcatggaagagaaaaagaatactgggtaaaaactaaggaaatctaaataaagggtggactttaattaataataatgtatcaatattagttcattagttgttacaaatgcataatactaatgctaagatgttaataaaaagagaaattgggtgcagaatatgtggggaccctctattaccttccatttttttcctgtaaattaaaaacttgtttttttaagtttcttgttgttgttgttgttgttgttgtttaaatcttgcttatcccaaagatccatatataaattatgcccagggctttggccatagcctttccttcccccagtgagaaacccgaaagcaaatgttacccacctctggaggctccaatgtctgagccttcttatgcatagccctcatccctccccatgctatggactggtcatccctaacatttacaaccaggaataagagtaaattactcgggaggctgagaaaggaggatcacttgagctcgggagttcaaatccagcctgggcaacataatgagactctcagctctaccaaaatacataaataaataaacatggaggcctttagccagggcccaatatcctagttcacaagttcaagctcaatctgtattcctcaacaaagattctttttttttttttttttgagatggaggcttgctctgttgcccaggctggagtgcaatggcgcagtctcagctcactgcaacctctgcctcccaggtttaagcaattctcctgcctcagcctcccaagtagctgggattacaggcgtgtgccaccacatccgactaatttttgtatttttagtagagacagggtttcgccatgtcggccagggtggtctcaaaatcctgacctcagccacccaccttggcctcccagagtgctaggactgtaggcatgagccaccgtgcctagcctccaacaaccattctttgctcaccctttgagtggcaaaatcagtcctcgggaggataaatctgggagagcagcccacttaaggctctggaagcaaaactgtggccatttgggcagagaattacagcgccctgggtgtctggagaatggtctaaacagggagtcaagaacttctgttccaaaggggagagtgtggctgaaggagggtcagatcatgtcctcctgcggttggtactgcctatggcctttcttcctccccatacattcaatccacacccctctcttaggctccctttgtgcctgcccaagtgacaccattggggaatagtgtgtatacaaaacagctgccaaatatatgttgccaaagcttctaaagcaggaaggagggaaatacggattcctcacctcaccttccagatgacccccggccactccactcatacttgagactgccacaaaccctgcttctcctcagtctctcacatatctgacttcccctgttctcccaggcccctcactctacctttgcctgctcccctgctgtcattctgtgcctgtagccacagcctaaggccctccacctggagccattcctggatcatcctggagcccctgtcgcatacctcagagcccaaactgcctctcttggagagaagctgtcaactgtgtgtccggtccacacaggactggggactatttgggccctgaggatggtgatattttgagctcaaaccattccctctggcagggagcctggcagatttctagggaggtgcctcctccccacttcgcagtgacagggaggcggcttttgtagtcaggccatctgccttctctgtctccccacctcccaccagcagccctttctctaggcttggcaaggtttccccaaaggctggactcctatgtacaaaggctcccttagctctgggcaaggaccatttttagtttatccactttgacctccctgcctctctagtctgtaaacatcagaggcagcctttcctatatcacctcttccttccacaccacaatatcttcctagggacccccttgggctctctggctcactgcaagcacaggaccgggaccccatgataatcctccaaagggtgaagagagatgctaacatttcctttgggtgtacaaaaaaacagccccccaaccgggcgcggtggctcacacctctaatccctgcactttgggaagccaaggcaggcagatcacctggggttaggagttcgagaccagcctgaccaacatggagaaaccccatctctactaaaaaacaaaattagccgggcatggtggcgcatgcctgtaatcccagctgctcgggagatggaggtaggagaattgcttgaacccaggaggcgaaggttgcggtaagctgagattgcaccattgcactccagcctgggcaacaagagcgaaacttcgtctcaaaaaaaaaaaaaaaagccctccagcccatctcaaagccccgtcctacttaccccactttcttttgctgttcatttcctctcaacagggacaggggccgaactcccatctctgccctcctagtcctgagccccaacctctttcttcatcttgttgcctaccttggctagagagagaagaggggaaggtggaagtcaaccagtcagagtgatatggcaaccctggagaagtgtcagaaaagcagctaggccagagtggggtaagaggtggcaaggaacagggttctgggtacccaaagggaagggaacattccttatctatctaggctagaaaacagtataaagaaaagtggcaagagtccagacccaaaaacccagaaacactgaaatcgttggtaaagcatacaaggcacagagggtgtcagcttcccttctctccatagggaaactgagtcattccttttccctaagtggaacattttcctctggaagcttgcctgggtccccccactatgggcagcaggtggatgggaaaagaaagacagtcactcccaaacacttatacacagctggctccaaaccagtctcctcctcataccagtcaccaaatcaaaatccctgctttctgtctatctgggggagggaatgatgggaaagaggtctgcaaggtggctgcacctcagggactcagggactacccctggatcccccacagttgcctgtctctgtcttcccactgccccaggagagtgaaaggcagaatttgaatcaactcttggaatagcttcccctctaacaccctggaggatgccttccctctccatactcccagcacaaagagaagtgctgtgatcctgaggccgacagtggctgggaagggagggcagcctgccatttcctttgtatggcccctccctccaggccctgagagctgctctgctttatacttttggcttccatatcatactaccctatcccctcctttaactggagtgggagaactgcggaaaggtaagccccaaactctgatggtaaaggagacttccctgctccccctcctctcctctctcctgctggcaaagataggatgagaagactctaagggaaagtgaaaccagaagctgggagcatttggggaatctaatacttggcacatattaaatgcttaaaaaaaaaaagtgtcaggctgggtgcggtggctcacgcctgtaattccagcactttgggaggccgaggcaggcggatcatgaggtcaggagatcgagaccatcctggttaacacagtgaaagcccgtctctactaaaaatacaaaaattagccaggcattgtggtgggtgcctgtagtccccgctactcgggaggcttaggcaggagaatggtgttaacccgggaggcaagctttcagtgagccaagatcacaccactgcactccagcctgggtgacagagcaagactccatcaggaaaaaacaaacaaacaaaaaaaaaaaacagtgtcagattaatgaataaaattaggagaaaccctgaaagacagcctggaaaaggtgtcagcttccttttccatttctcacctcagctaccaaaagcaagactcagccaggcctggtcccttccctggctccctcttttgtgacccatagcaatagcgcctgatgggacaaaggggagaattaagtggccactttctcttaccaggtaattgctaatttgccagtctctcatctcctgcatcagcctcccaagtagccagaactgaaggtctgcaccacaacacccagataatttgtgggtttttgtttttggttttttttttttttgagatggaggtctcactatgttgcccaggatggtcttgaactcatgacctgaagagatcctcccacctcagcctcccaaaatactggtgatgtcagtcagccaccttgcccagcctgctctccaactttctttcctccatttgcaccactctttctgattgggaaacccctaggagggagaaacatctgagctttgagttctcttggctggtagtacctcagtttcctctgctgtctttccagagcacccccaataagttcagctctgtctgcagagtctagaggtatatgctggacatgtcatcacttgctgacctagggtccaagaggtcaagatgagatagaggaagggatttactgaggcccaggccacagagcttgttccatggtggctggtagaggggcctatctcctgtttccccaaactgctagagatgtgtaaggcttttgagcaggggtagaggatgctgtgtggagttttagctgccagactttgaaaaaaacctcttcagaaagatatctggataccttggttcctaggggtcgtatcctcaagaaatcttagggtgcttcctagcaacagtctggaaggaagggagggagagatggagggagagagggaggggcctaggcatggctgttctgatgggagcccagagaacaggctgttcctgctacctccttagcaacggaaatctcagctggaggggccatcagacatatcctcttggagggtctatccagccttattcatgccacccctaccctcctcatagattcggggaatgctctgaagcagaggtggggaatgggaggggacagccctggtggtggtggggggtttcatgacaaggacggaaaaggagctgaggatgaactcaatctgagaagagctagcagcttcaagaaatgggtgggcagggtgagtggggtgggaggacagatgaggcaacacagggacagtggctatacgcccagacacgggctggatcctggcacctggggagaggcctgctttgaaagcagtgtgcccttcactttgccctgcccagacctgtcaccagtccatactgggagcccaagaaaaagagagaggtaaaaagaagatgggggtggccggggacggtggttcatgcctgtaatcccagcactttgggaggccaaggcaggaggagcacttgaggccaggagttcaagactagcctggccaacatggtgaaaccccttctctaccaaaaaaacaaaacaaaacaaagcaaaaaaacaaaaattagctgggcatgctagcacatgcctacaatccccgctacttgggaggctaggacatgaaaatcccttgaacccaggagacggaggttgcagtgagccaagattgtgccactgcactccagcctgggcaaaagagcaagaccctgtctcaaataataataataataataaattttaagaaggagaagatgggactggtaaacccttgtctttgagtgctccactctgcccctcaggaaaaaaaaaaagtggaacaggaggcacttcattttctatggctctgggtttaggatttcagaaagtcgtcaccacccaacattatagggccttgcatcaaagagagatatggtggggaaagccagaatggaagagagacaaaaccgtagcaccttcctcctccccctctggacaccatcactcctgccctgatccagattaccgctggccctccccactgcctcctagttctgcctttgtgatgcagagtataaatgtatctcatgcattgggattccctcccagctccttgagcagcccaatcccaagggactagttccatacagggtagagtacagaccctgagcactacatactgcagccttgctccccagggttccggccaaacctgatcaccgaggaggtggcatcgactggcagacagccaccctcagtgcacctcattccactcactgcactgactctgcacactgcagcctcctgccccacactgcagctgttgcttgtctcctgtgagcccagactgaacacaggttcgcttactgcatggaggctccgtacgctgcagcctcaattccccattacagctgccactgcacaccacaggctcccttcacccatggcatgccctcaacaccaccactgcactctgcacgccataggtttcatcccagctgctcttctcatctccatggttccagggaccccaagagaggtaccctcccctccgccaagcattacgaactccagtaccccctgtgaaagaagtggttccaacagcactgaggatgcaggtggctgagactaagacatgagcaagggcagcccaacttgggtaagctgtggctcagaatcccacactcgccaagtgactctgcccagtataaactgggcgattagccgagcagctccccctaacacacacacacttacacacacacacactcacacacacacccctccccaagagcagactatgtagccagggccccaccctgagagccgtgggaaggctgtggcccccgctggtaaaactgggctaatgacagcaggggaaccggcggggccaggggggtgctggggtaattagggctcggcctggcgctaggagatcctgagatgaaaggtgctctggcgtcactgggttggttttatgtccatgaatgcaggtgtgtggtgtgtgtatgtgtgtgctgggggtggggctggcatggtggagacctctcctttgggttgggttagggggtccatttgtatgcagcccaccgtcttccttagattgactctggtaccatttggatttttgtgggagcaaacatggggggaaataccaccacccgggagctaggaattgagggggtatggcagatcttgtcccctccccgagctcaggagagggagcagattgttgggggaaatggctggtgacagagaatagaaagagcctatatggagaagggtgacgttggaaaagggaggcagtggatcggtattgatgttagaaatgagaggggagggaggtaacagggaatgaacccccacaaggatgaaaaacgtaagatgattgaagttaaaaggacatcaggggtcacctgcccagccctcgcagctgaagcttgaggaagctctgcccccgacagcagtggcgatttgtcaaggtcacacagtgagttaccggcggagaagggacccgaactcccaaacaaactacacctgcaagcgtttggtgtttagactttctccccgatgtataaggtgcaggctgctcgtcgatacttcctcctccaccctcacggtgcacacccgaaaaccccccaattctcccggcaagcaaaggctattttttaatgacatcttttccaaaatatgtcaccaagtacccactcctgcgggagccgcccgggctggggagggcgagtccgagcggggcggggcagaggcggccgaggggcggccggacctctggcgggggtcccggggcgcggcagggggcggggggcgggggcgggcggcggcgaggcggcctgcagggagcagccgcgagccggccgggcgcgccgagcccgagccccagccggagcggggcgggggagggaggagccagagcggccgccgcctctgccggaggagccgcggggccgccacactcgccccccgccccccccgcgctcactcgcactcacacccgggcgcaggaggcgggcggcccgggccccaccggccccccatggacgcccccagcacggggcgctgagacccccgcgtcgctgcccagcccggtccggcgcgccacgccgaggtaaggaggagggagcgagggggcattaatatgcaaatgccttgcgattgattatgcaaagccgcggggctccgtggccagctcccaggcgggctaggggcgcccagggggtgcctgctgccagcctcagcctttcctggcgccccagtgaccctgtcacgagcccgggagcttgcaactgacgccctggggaagggaggtgttgctaggaggtcgctgggccccggggttcgcaggcggagatggcgtccgagcctccccctggagggcccgcccggcctctgtccggccagtctgctgcgcattcccgggccgggccccgttgccggccgccggagctcccccgcccgccgcgccgcggtttgtttacggtgcgccggaggcctgcccccccagcccccacccctagcctctgaggcccgagtggcctttgcaaagctgcctccagctgcggagggcagtatgagtgcggtggcgcgggtgggcttgcacgggtccggggagagggaagttcccccgcctcacccgcctcccggttgagcatggctgtctggttgcaacactgctaattgcaaaaacgcggttgttgggggggaatgtgtgtgtggaaggggtgtacttggtggtgcctagatgattaggagagttgctggctggggaggagagggagaaatggacctgtgtgtgtgtaccccaccttgtttccctccccttgcaacgtgtctctggtgccccttctccatctggggccctcccttgtccagcgtgaaagaaaggcctggggggatgacaggggcaattgaaagaaccaccgttccaggggtgggggtgggggacacagaaggaaagccagtgaggtgggagcctgcccctcagtgctggctttggctccaggagggggaggggatgaagggggctgttgtccaaaatgaggggggaagcaaaagtgacacgcagacacagagatatgtccacacagacagccacatgcacatccagggacacccaggcagactcaaggacaggagctactggacacacccacatggggacaagggaagagacaggctgctgctgcaccgtggagctctgaggggtgggatatacccatgggagaccaagagcatggggaccgatccatgcacatacccacgcacagggtcacacgtagatgctgtcacacactggggcaaggaggagttgctgtcacccacacataaaaagtcactgtcacatgcatgcatgcacacagagcaattgcacacagcagcacaattacaaaagaccctgtcactcacaggcacacacgtgctcgcatgagcccagtcacacagacatcattgcttgccgtgacagtcgctgtcactcagtcagatgcaaacacagttacacaccaacacatgtatacacaacttagcaacaagtattttcctggactctttactgtggagctctgaggttctgtaggcaacaaaacccttgctcccaagaatattaaatttggctgtatgaaaaagtgttcctgcgtaatggtgtaaagcatgcattcccaatgacatgttcttggtctctatcgcttgagataccaccctactagacagtgagctcttggagacctgggagaatcacttaaagagctctggatcccacgcagagcctagcacaagggctgctctgtaaatacttgttagttgattgactgtggaacctgcagacacaggtgcactcatttgcacatggtcccctgaactcaggtgcagaatgagttcacaaggcccaggtccccacagttgcaggtccacaccaacagtcgtgtccacacaaccccagatacacacaactgcagcctgtgcagccgagcacacacttagatgcacacaatcacaaatttttccccttcagcttcctcctcccctttttcctctaggctcagccactgtgcgggaatgggctgttttttttttctttctttcttttagagggacagagaaacaagagcaaagacagtgggttcaggggggttccagagggccgagtcatgggctcaaagcagtgtccagtgacttctagaagctaggattctcttgactgttggggaaggggagagctgctctcctccctaccctaaaagctcaggggtgtctaactgcccctgctctgagtcatttgcctgggtctttcctgggaacagtcagtcacttccagctgagttcctgcgccccaccttgagtctggccctttttcccacctgtaccctcctgtccaaacttggaagctttccttaagaggccatcggctggcgagtgtctgtgtgagtgatatgtacttttgacttggaatttctctctaactctgtctctctgttgctctgtcttgcagtgtctgattctccctctctctctccttgtttctctgccagtctgtaactctctctcaccctgttgctacccccgatctacccctgtccttgtctcagagctggggactggcagcaatgttcttcatacttttccagttgttaatacccaagctccgcccctctgccccccctgcgcagcctctggggtcagcttgaggttggggtggggggcggggggctcagctggctgctcaggacttcctgcacttccttagtgccgcagctgtggccagcaagttttaggggctgggaatgggggaagggggggggggtcagccactgcccatgctgacccctcgggcctgcatgtctggagacaccagttctgtgggcaccctcagggtgcaggctgcagccagctagcagctcttaaacaagccatgaagaggctccccccacactggcccaagctggaaaagaaccgcccccatgggcagtggcgggagctggcaggaccctgctgagttgggtccactgcagggctcacaatggcctttctccacacccctggcagctgaggcccacctcagagatgcccaacagctgtgtcctttttgcccagcctcagggcctggttctgagggcacagctgcctagactaagtatgtactaagcgaggccctcccacccgtgagtgcaggttccagcctagaaggggtacctcttctggagagggaatttgaggagggggaactcaggcaggagacatcgagcccgggggcaccaagcacttctcgctatgctcccctctagccttggactatttggaggtggaggcacttggcagagaacccacagggcagctacagaggggaaagactgaggcttggtctcagggaacacatagctggatgaaagaacaaggcattgggccgggcacagtggctcacacccgtaatcctagcacactgggaggcggaggcaggcagatcacctgaggtcaggagttcaagaccagtctgaccaagatggtgaaaccccatctctactaaaaatacaaaacttagctgggtgtggtggcggggtcctgtaatcccagctactcaggaggctgaggcaggagaatcgcttgaacccaggaggtggaggttgcagtgagctgagattgtaccactgcactacagactgggtgacagagcgagactccgtctcaaaaaaaaaaaaaaaaaaaaagaaaaacaaaaaagaacaaggcattatctatcaagcaggtgatataccatcacagctaagaacagagatgatggtgatgatcatgacggccatgattgacctggactgcctaggtctgaatcccagctctgtcacttgctggatgtgtgactttgagcaagcgatttaacttccccgttgcctcatctgtaaattggggatgatcatatctacctcatttagcttttttgaggaaaaatgtttttaaaagtgcctagttcataacaaactgtatatgtgagcggttgtgatgggtgaaggaagctgtgggcctggggtctcccagatttcttagagaagcttcgtggagaattgggtctcctagacatcagtgagactggggcctggggcagtgggtctccaatttccagccttctcaccgtcatgtaatcttttcctcccagacaaatttttgcagcctggaatgagtgtatgggaaagagcccaaggcaggcccctctgccccaccctcctttgaccctcgcccttcagcttacaaggagcccttggcccctcagcctgggacacaccccaccagctaggggcacctgcataaatctttgggcatcactgcatctctgttcagggtctgagctctgggggtgggagagagagaacaaggaaagccgtcccctctcttatgtgtgggctcaaagaggaggcagtgcccttcctccctcctgggagcccagcattggtcaaccaggacccagctctggctgataggcaccagattcccctgccctccatggagtggtacttagtgtgaaaggtggtggcagagagaaactgaagcactgagtaatgaccagtgtggtgggcacagcactttgagatccagcatctgtcctgggttgcctctttgcctttgtgagtctggtgatcaggatcccctctccaaaccccttttatttagccctgcccctcaaggtgaaggaaggacaatgggaggataccctgtaggggtgacgggaagcctttggagtgggaaccaatctcaactctagttctcggctgggcacagtggctcatgcctgtaatctcaatattttgggaggccaaggcgggaggatcacttgaggccagtagttcatgatcagcctggtcaacatagtgagaccccatctctaaaaacaactttaaaaagttagccaggtgtggtggcgcatgcctgtgttaccagctacttgggaggctgaggccggaggatcgcttaagcctggaaggtcgaggctgcggtgagctgtgattgtgccactgcactctagcctgaacaacagagtgagaccccccacacacacatcctctcaaaacagacagaaaacaaaacaaaaaacccaactctagttctcatggctgcaaaggtgtctaggggactttggagaactgttgtgtctcttggggagggaggcaagcatgaccgtggtgggaagatcactggctgggagttgggaggcctggctgttgacattcactagtcgtatgactttgggcctgggttttcattatctagagacaatggttcctgtctcactcaggttgagggcaaataacacaaggtgggatgacccctgtgttcaatccatgttgcatcctggcatggtgagcaatgcctgtggattctccttttttcccagggcctggcacatgccagggtggggcatacacatgctgcctggaaccagagacagttctcagtctctcactgaagtatctggggctggtgtgtggtgggggcacatgtggttccaccttggtgtcacttggcaggccaaagctggggtcatagggacctccctccggtatgccattgcgtgaggtggtccagagggagggtcagaagtttgctgggtagacaagggaagcaagatgggtgttactggtgcccaggaaatactatccttgcttcgctgttttgggggtgggcattaaaggttgataccaaagcctcagccatgcccctcagcagtggccaagagcagaatgattggaccaagcccctggcccacctcctcctcctcctcttttcctcttctaaagaagagatcggctcttggctcccagagccccagctgcctgtttctttttctcttttaccaggcatgggggtggggaaacaggggaaccgaggctttggtgtctttcggcatttttgtacacatcagtgagtgggtgtgttgtgcacgcatccatgtgagagtgtttttgtgcatgtgtgggctggggagggctctgaatatctcctggaacggtacccagagccctgtggctctgcgcatgcggggtgagtgtgtgtgtctgcacgtgtccgtgtgtgtgccggagactcagctgcattcacgcgcgcgctctctccctccctctctccctccctctctctctccctccctcccttcctcttccctctccctctctctctccccctccccctctctgtctctccctccttctctccctccctctctctctctcacacacacactctcaatctttctctcttccctcccccttcctccctccttcctattccctccctcctccctttctgtccctgtctctctgtctctgtctctgtctctctctctctgcctctgccagttctgcttggttaggggctagctccagcctctggggtgcctgggagaacatccctccctttctttccccctccaccattccctcccctcctaggccatgctcttcagggcttgcaggcaacttcttctactgccttagatgagggagtgaggagggaggaccccaagccttgtgcccatggtgccatctgcagcaagtgccttggccccgtgacattcatgcctccagcattcagctgccccagctcccagctccaattacccgctggctgctgggggagggtggggagaatgtgccgtgcccagcttgggggtgctcctgcttctgctttcttggctacttggatctcctgcctccattcctgaggggaattgggcagggggggcgtgaagttctgtgggctgataaggaggggctgagttctccagcatgggtgtgggcatgaccacccaccagtggtcatgggggatggatgtgacctgggaggagacctccagacctgggcacccaccttgatgcctggctggagctggcccgggcaggaggagggagaggagagcagcaggtgggtgaggctatgggggagccgagtgggaagcagtctttgatgttaatactgggcatctggcccaagtcaaggctgctgtttatgtctttctgtctctgacctgcagggggggtttcctgttatattcttttggggcggggtggggaggatcctttgtttaagtaaccaatctcccccttatgaggatccccaccccatctcccattctctagcctctaaggtcccacagtggctaggtgatgagtcactgccccccagctccagaacctgtctcctgggggcccagtgagagctcaccaaggggtgccgcctcccctcctcccgtctcccccatgcctgccaggctggggccctgagtctgtgtgtactcctctgccacatcacacctgccaaatagtaccttccttcccgccttcactcctcctctccttcctggcactaggataacagagagttgggtggggcagccctgctcaatccatacctgagaatagaacagggggtatgggaaaggacagggagtcccggtcctagagaggcctctgcccctcagcatgggggcacatgtcgctgctgcagcactgccaccaccacagactcccaggggcccttggtgtgggtggctgcctgtggtgcccgtgttggcatggggggcagtgctgcccatagacgcctgtgcccatgcatgcccatttatgtgtctgggccacggtggccgccccggcccctcagcatcgcccttcctggctcccatggtgggaggctgggtgatcaggagtgggtggtgggggagggatctccccccaccctagcagcaggcagaggggaaggggagagggaggtgtgaacctacccacagaactattaatagcccacatgccaggccaccaagaaccagctgtcaccgtggaaaccattcctacgcccccctccccccagcctgcatggggtgggacttagacagggtacgaagccccccacccatctttctttgttacctttctctctttgtctcccctccttcatgtgtctctcctccctttatctgtcctcctttctacctcaccccttctccccatcccccatctctggctcccctttcttcctctccctctactgccttgtcacccctagctctaccccagccctgtcccatttctttgttcttccccctcctcccttcttccctctttcccccaccagcctttttacccctcctcccatctttccacccttttctcagccgccccgcatgtacgtgtccctgtggctggcaaggagggctgggctttcttcagagcactaaggacaaagttcaggggccccagaaaggtggggccaaagcccagagcagatacgcaggagggttaatgcgggtagtattgggggttagatcctggggacagaaactcccctctggcagccccaggagtcctttgggggtgtcctcagatatacaggactgcagagtgggacggctcggcagtgggaacctggcggggcgcccgtggatgccgcattggccccgtgtccctgtccccccatggcagaagtacttaagcttaatgaaatgcttccccctccacgggcactttgcctacactgcctcccagcagctcttatctcacaaggagggagtgggtggccaggccagccgacaggtgggtcttgctgtcctgctgtccagcctgggcacagaaccccatagctccgccccctcggcctccttggggcagggcctccctcgcctctgcagaggaggtaccaggaaggagtttggggagttaagctggactctggaggaggggtgagaggctgcccttcagggtgggtacccctgccccatgccccttacccgctgacctttttctgtccgtggctaacacaggctcatgtggtatgtgtctccccacatgctgggccctctgcctcgcctctgtatcaccccaaaggcccaagtgtgtccctggagagatgccaaggagtccccaggggttccagcctctttctgggtacccagtgagggtgccctaggcagcaagggcagcaccttgctcctctgcccactaccaggggctgactgtagctgggctgcactgcccagcaccagggcaccattcagttcaaaagaggggtggggcagagagcgagtctgcccctccccccagtgggcacgtgcaggcccttggcagtacccagacacatttggagttaaggctgggcaggagagagggatggggaaataaacatggtggcttaggttggcactgctccaggtctgcaatgtagcaactggtaagtggcaggggcctgggggaggggaccctcaggagccctggcctggggcaggagctgcccatgccatgtggctgccactggtgttccccgcctggcccggcccacagcagccagtgctcattcctgcacacactggtcctcctcggctgcccccaggacctgctccccggggctgcccctctctcagcatgcccactcctgtgcttgcctcctcccctccctgggggcgcttgggcctccggctggcgagtggatttttccagcttctgtaaacaagtggtggcagtgtgccaggcgggcaggagacaggcgggggcagcaccacagccagggtgtgccaagcaccgaggcacagcctggggggcagacggagacacccagacccggagagagagacattcagacacagacagacagacagacatgcaggcagcctcgctggacgtggagtcagaagatcgtcctctattgtccagcccaacccccgtagcggccctcgccccctgcccctcactgtctggctgagagcattaggccccagtgcccagcccctgggcttccccacccactccttctcctccccaacctccaccccttagggctggctacgccattataaatttataacaggaatttctccacaagccaagaaaaacttgacctactttcttgatggctccctgggctaaggctccctgctcatgcccccccaccccagtctcctgtccagcccccagtgcccagtcctggtctggggtgggtatcagaggtagaacgggccacttttctgtgcaatgcccatgctctccacactaccagcttgcctgggtgcagaggccccgttctgctgctggccctgcccaatcccctgacttatctccctctctcttcccaccctggctgcttatcagctcctgggggtggggccagggggcctaggggtgaggtctcctatgcagcagccacgtgacagaggttgaggtcgtatgttggggagctgtaccctttgtccccctcctacccgccacacctgcctgtgtgcacacagacagtaagccacaggtctgcagcccagggtcagaggtgcaatgccgtaggaatggtgggcccggcttggcactgccctggactccaggtagcagaacaaggctagcattagggccaggctgtgaggcttatcccacagccacctgcttactagttgtgtgaacttgagtgaatgaccaagctttctgagactcagtttcctcatctgtgaagttctcgtgccctctttggagggtacagattctctctccagttaatatgtgttagtttcctttcctttcccccttgccatcctggtcgatagcagctcagctaaaccaactgagaagtctggtcctctgcctgggaagtgggattcgagaccttgcgtgggaagctctggagtccctgaggggccagagttggggatcataacttggctggcagcatgggaggtcagttccctacagctttcaacatctctctctattaaggcacaaagatgggcattcatgctcactgcgtgccgctctatgtcccatccttccttcacagataccctccctgcctatgctgaaaactgcttgtctctggtcccctcttgcccctataatacagatgagtttcaggaaagcttttctagaggggtggtaacaatagctagtgtttaatagttgctcattaagggccaggcatttgtctgaatatgaagactgagacatattacttagtacatgaatgatctcattctctccctccattccttcccatgtctggggcttaggaggtggatctccaatctcgcctgctgtacctgttatctaagggatcatcctggtcccctctctatgcctgcccttcctgccccctgctgtcttgttatgggatcccaaagccccaaatgttgccaccaaagggatcctacccaccttcctaccgtgacaccttcttacccctgcctctctcttctctccacagggatctctggacaggacaagactccgaagctactcccccagcacacagcccgggacccacaaacccagcttgcccccagccctcccacctgccactccctggcccctcccaccgcccgccccccttggggcgcagggcatggtgtgaaaggccaagtgctgaggcgggtatcatgggtgctgtgccctagggcctgggtggcagggggtgggtggcctgtgggtgtgccgggggggccagtgtgcccaccccagtctcttggcgtgctggagggcatcctggatggaattgaagtgaatggaacagaagccaagcaaggtggagtgtgggtcagacccagaggagaacaggtaatgggttcagcaactaggtcatgccaactcctaagcagcaggcatgggcacctggctgagctctcctttaggcaccgcctttaagcacctctgtgggatggacgtgaggccagcaagccttctgcctacctttgtctggcagatgaagtcatgttcagatgtgacaggcacttggattgagagatgctcattttgaagcggggagcgatacagagcaattacagggagcacataaggggctcttccctagacattgctgggcagtctcagatgcccccaacgtcccttccaccattgctgcccttaccttgagcatgtgggatccaaacagccttgccattttcttcctctccctaccagcccatttactatctgaccacaagtgtgttgtccacaagctgcggttcacgtaatacatttcagggcacatgcaccagtaactattggtcatagcccaagcttatattcggaatctattgggagccccacaagctcttccttgttcatggtcaagggcgggcactgcgatggggctcctcccagaaagtgcacgccaaccatgatggttttgcttccacatgggtgaggtgtcagccctgcacatacaccaagggatggttacctgtgatctgcattgcccttgaggagcccagagggtctctgtcttttctatcagctccaagtggcacagagctttgtcccagttggcacggtgccctgggagctgggtacagcctgtgcctatggccagggagagggtgggggtgggggtgctccggggagcagtgtggctgactgttgcctaggagatcagatcccgagccaggaagccagaggcctggccaggcaaagccctaaggcccacaactgggtccctggagggtagaggaagtagatggaactcacagctgggcagggcatggggtagctcccctcccccaaagcctcaccccaggaaggactctgaggacgatctggcctgtcgctgtgtggctgtcacttgcagcccctgtgtctcccagcttaggcttctgtgggtctggaagagtctgtgcttaatgtttggagaaaggcaggaatgccagttcccagtctcctaagactgcaacccctcccccatcaccttcccctcccccatgtctatgcgccaccttgtggctatctctaggactacactcagaggctgtgagtctggtggtaactgctgaagccgctagctcaactggggcctaggtgggctgagttcccctgcacccaaccctctgggaggcgtgagggagacctgacctttcagcctcataggaagtagaccggagtaatccccacggggcgtggagcatagggttgtctgtgactgtgaccctggccaaggtcactgtgtcagtgtgttgggagctgcatccggctccaggaggaaggggcctgcaacatgccacacgcagggtgggtgcgggaggttatacaatccttgcatgcatgtagagggcttatgtaacctgtgtgcaccgaggttatgcaacatgtatgtggagagcctggcaacatatatgtgcagtggctgagggttgctaataatacgctgcacagaggggctcagtcccggctctgactctagctcatggtgtcaccaggcacaagcagggtctcagtttgctgctctgttaaatggaggctgtgcagagggtgtagtgttttctattgctgtgggttatttagcatgtgtgtatgacctggagctcaagcaacacgtgcacactggagggatgagggtggttttatgaggtgcctgtgcagagtgttgtgtaacacatgggcatatcctagaggttgtatagcacatttaagaatgccctgaaaatttcacaggtatgttggccctggtgcatactcaccatccatgggtttatagtgaaggttgcatggttattcatctgtgccggtgttatgttgcatatgtatgtgtgtgttctaaaggctacatagctttaagcatatcctgagaattcttccagcgtattcgtcatgtactgaaagatgaggatgtcctgcagattatgggtgcttcaggtcttctggcgggtgaatgtgtgtgtgttggggctctagaatatgcttgtgccacagccaagccccttatctctctcccctgcaacttccagataactggacccttttaagcattgtcagctgaccctggggggtgggaggtagaatgaggacacaaaatggaaagaatcaggccttgggggattgcataagcctctcggatgagaaaggggctactcgaagactgctctgtgattctgcccactttgcctccatccagtgccaggtcaccagatggaaagcgaaaaagaaagaacggccaatgttccctgaaaaccagcatgtcaggtgaggctggctgtgcgtgccccttctccacgtccccaaccccaccaaacccagccagggctcctctggacctggatgtggaacagtaattcatgtgttccctggggggagcctcctagagggcttgggatggacttgtctgggggtgagaaaggtaatgtgggatgtgcccagcttttgagggtggattaggtcaggacggcctcttccctcttcccctaataccctcatctgaggccctaccagaatcagggcctgagctgaaggactgaggggctgtattatccccagtgagcagctgacgtttatttttccctctccaccatcctctgccttgtagatagatcaagaagaaagccctgaatgggcagtcagaagaactgagattcttcatactcttagggcagagatggacaggttcacctcgtgtctctctaggattctaccagggaggctgggctaggagaggggtcagaaacaaaaagttgagggatggggaaaagtgtgagagcctctctgctgggactccaagccatgcctgccttcctccatcctttccttcctcccagggtatatccctagttacctggacaaagacgagcagtgtgtcgtgtgtggggacaaggcaactggttatcactaccgctgtatcacttgtgagggctgcaaggtatggaagctacctcctgcccctcccctgccacctgagcccccatattactccctatgtcacctaaagcccgcctgttaggtcatcactttttttttttttctttgagacggagtctcactcttgtcccccaggctggagtgcagtggcgcgatcatggctcactgcaacctccgccttcaggttcaagtgattcccctacctcggcctcctgagtagctgggattacaggtatgcacctccacacccagctagtttttttgtatttttagtagagacggggtttcactatgtggccaggctggtctcgaactcctgacctcaggtgaccacccgtctcagcctcctgaagtgctgggattacaggcatacctgcctggttactttctcttctcttctcttattcattcatttactcattcataactcctcctctgccactcacaggaaaattgcctaacttcttcgagccttagtttcagtttcttcatctataaaatgaggataatcattctctctaccttatagcattgttgggagaattaaatatgttgggagatagttcacttgaagtgtttaaaacagtgccattgggtgctgtggctcatgcctaaaatcccagccctttgggagggaggccaaggcgggagcatcccttgatcccaggagtttgagaccagcctagctaacacagtgagacactgtctctacaaaattaaagaaattagctgggtgtggtgccacatgcctgtggtcccagctactcaggaggctgaggtgggagactgcttgaacccagaaggtcagggctgcattgaacggtggtggcgccactgcactccggcctgggtgacagagcaagattctgtctcaaagtaaaataataaaataaaataaaaaatagtgccatgtgcataagaagcatttgataaatgccagccatcacccattcattcagtgtattcttaggtgtgagagtgtagtacgtacctcgccttcaagctgctcacagcctgtcagagagagagacacaacttgaaacaaacatcagtgttattcaaaatgtggttcatggaccacctgtcctactagttaaaatgcagattcccagccttcatcttttttttttttttttttttttgagatggcatctcgctctgttgcccaggttggagtgcaatggtgtgatctcggctcactgcaaccttcgcctcccgggttcaagcgattctcctgcttcagcctcctgagtggctgggactacaggcacctgccaccacgcccagctaacttttatatttttaatagagacagggtttcaccatgttgaccaggatggtcttgatctcttgacctcgtgatccgcccgccttggcctcccaaagtgctggggttacaggtgtgagccactgcgcccagcctgcccaggcttcatcttaaccctgctcactcagagcccttttgtggagcccaggaatcttccttttaacagaatcccggagtgtttcccatgcacctgaaagagcgagagccagtactgggggggtagtgggagctgggagcacagaggagaagaggacagcaggttcttccaggcagaggggatgacaaggtcatagattttgggaggcctaattgttttgttttgttttttttgagatggagtctcgctctgttgcccagcctggagtgcagtggtgcaatcttggctcactgcaacctccacctctcgggttcaagcaattctccctgcttcagcattggtagctgggattacagacacctgccaccaagcctggctaatttttgtatttttagtagagatagggtttcaccatgttagccaggctggtctcgaactcctgacctcaggtgatctgcctgcctctgcatcccaaagtgcttaagaggcctaattagatttcactttgatcatttcagcctggatagcctttccaggatcacctcctaaaaatgcaaggccttccaagaaacagaattatttaaatcccagcactttgggagtccaaggcaggcagatcacctgaggttaccacacccggtggcactgttttaaacacttcaagtgaattgtctcatttaattctcccaacagtgctataaggtagataaaatgattatccccattttatagatgaagaaactgagactcagagaagttaggcaattttcttgtgagtgacagaggagggattatgaatgagcaaatgaacgaatgagtaaggtcaggaatttgagaccatcctggccaacatggtaaaagcctgtctctactaaaaataccaaaattggccaggtgtagtgatgtacgcctgtaatcccacctacttgggaggctgaggcaggagaatctcttgaacttgggagatggaggttacagtgagagtggagattaagtcagtgtactccagcctgggtgacagagcgacagagtgatactctgtctcaaaataaaaaaaaaaagaaacagaatgatttatatgttaaaggccaggtatagtagctcacgcctgtaatccaaacactttaggaggccaaggtgggaggattgcttgagcccaggagtttaagaacagcctgggcaacatagtgagaccctgtccatacaaaaaaatttttaaagtagccaggcatggtggtgcacacacacctgtggtcccagctactcaggcagctgaggtaggacgatcacttgaggctgggaggtcgaagctgctgtgagctgtgattaagccattgcactccagcctgggcgacagaacaagaccctgtcttaaaaacaaaaaacaaacaaaaaaaaaaaacggaaaaaaagtttaaggcttgaagtttctctctctttcttgatgtcaaccaaaccaagaccatgagggatttagagttccctagcagaagcaatacaatccttctggaagcaatacaaacagtgtagcatagagaaaggatcttttactctcacggacatctgagtcccagggaagcaccctgaaaagacagagatgccttggccccacccttggatagttttattttgtagttctggagtgaggcccaggaatctgtatctttggtaggtgcctttggtgacttttttttttttttttttttttcaagacggagtctcactctgtcacccaggctggagtgcagtggcgcgatcttggctcactgcaacctctgcctcccaggttcaagcacttgtcctgcctcagcctcctgagtagctgggattacaggtgcctgccacctcacctggctaattttttgtatttttagtagagacaaggtttcacgatgttggccacgttggtcttgaactcctgacctcgtgatccacccacctcagcctcccaaagagctgggattacaggcgtgagccaccgcactcggctgcctttggtgattttaatgcccctggaatctgagagctcagacgttggtgtcccatacctgaggcccagttctgactctgctgcccaccggccacatgactttgggcaaattgcttcatctcaccaagcttcagtttccttgtctgcaaagtggaggcagtaacagttcctacctcatagggttgtctggagggttcactgtgatgttccatgaaagacaaggcttatcttttgggtttttgtttttgtttgtaatggggtctctgtcacccaggttggagtgcagtggtgcgatcatagctcactgcagccttgacctcctggtctcaagcaatcctaagcaatcctcccacctcagcctccagagtagctgggattataggtgcacgccacaacccctggccaatttgtgtatttttagtagagatggggttttgctatgttggacaggctggtcttgatcttgaactcctggcctcaagtgatctgcctgcctcagcctcccagagtgctgggattacaggtgtgagtcattgcacctggccagcaaggcttatgtttactaagtgactgacacattgtaaacatgaaaaaatactaattcttcatattattgcaatcatcttgagttttgaggtgtttcctttaaaataaaggcgaggctgggtgcggtggctcacgcctgtaatcccagcactttgggaggccgaggtgggcagatcacctgaggtcaggagttcgagaccagcctggccaacatggtgaaaccccatctctataaaaatacaaaaattagccgggcgtaatggtgggcacctgtagtcccagctactcgggaggctgaggcaggagaattgcttgtacctgggaggtggaggttgcagtaagctgagatcacaccactgcactccagcctgggtgacagagtgaaacttcatctcaaaaagaaaaaaaaaattaaattaaaaaaataaaataaaggtgaatcccaatgtagagaattgaaatttttctcttcccctactagagttcatactcagtccctttccttgacttttttggttcccctgttttatgaattccacctgcatggacaacaggcaacatatatgagaatggtttttgggtcagtgttgtttttaaagtcatttagcaaaatggaaaatgaggttttacttggatttccttttttttttttttttttttttttgagacagagttttgctcttgttgcccagactagagtgcaatggcacaatcttggctcaccgcaacctctgcttcctgggttcaagcaattcttctgcctcagcctcccaagtagctgggattacaggcatgtgccaccattcccggctaattttttcttttttttttcttttttgagatgaagtctcactcttgtcacccaggctggagtgcaatgcgagctccacctcctgggttcaagcgattctcctgcctcagcctcccgagtagctgggattacaggggcaggcccagctaatttttatatttttagtagagatggggtttcaccatgttggccaggctggtcttgaactcctgacttcaggcagtctgcccgcctgggcctcccaaagtgctgggattacaggcatgagccaccgcgcccggccaaggggtggaccccgccgtggttccaccgcggctcaaacctaggaccttctgcatgtaaagcagatgtgataactgctacactatagaatcgcatgcttttttttttttttttttttttttttgagatggagtctcattctgtcacccaggctggaatgcagtggcgcgatcttggctcactgcaacctctgtgtcctgggttcaagcaattctctgcctcagcctcctgagtagctgggattacaggcgcccaccaccacgcccgggtaattttttttttttttatacggagtcttgctctgtcacccagcctggagtgcagtggcgcgatcttggctcgtggcaagctccacctcctgggttcacgccattctcctgcctcagcctcccgagtagctgggactacagcgcccaccaccatgcccggctattttttttgtatttttagtagagacagggtttcaccgtgttagccaggatggtctcgatctcctgaccttgtgatccgcctgcctcagcctcccaaagtgctgggattacaggcataagccaccgcgcccggcctacgcccaatttttatacttttagtagagacagggtttcaccatgttggccagggtgatcttgaactcctgacctcatgattcatccgccttggcctcccaaagttctgggattataggcatgagccactgcacccaacctcatgcccggctaattttctatttttagtagagacagggtttcttcatgttggtcaggctggtctcgaactcccgacctcagttgatctgcccacctcggcctcccaaagtgttgggattacatgcgtgcgccaccgcgcccggcgacttggatttccaaagctgctattccttaaggcctcacattatcccaggttcaaagctgcctgctctagacatcattcctgcctctgccacaaacactacccagacacccccaacccctcagcagcctgggggctgagggcatatatttctcaggtccttgagcctagtaatcttgggctcatggtgtcaggaggatgccaggtcccctcactgatcttgccttccttgctctccacccctgacccctagtaaactgcatggttggttcaggaaggggaagccatgtcatgatcacagcctgctccatctcccccaccccagggcttctttcgccgcacaatccagaagaacctccatcccacctattcctgcaaatatgacagctgctgtgtcattgacaagatcacccgcaatcagtgccagctgtgccgcttcaagaagtgcatcgccgtgggcatggccatggactgtaaggggcccaggtggagggaatagagccaggtggcctggggtggggatgagttctgggagggcagcttccttccagggtaccctcagagcccacagggcagagtggcaatccagtctaggtcagaatgttcagtgtcttggtccttgctgtcctccttcctgcgcaaaaggaaacaggatccctgtgtgggccccaatgcctacctgccttacaacactcgagggccttagagagggagtcgtttggtagaaagagctcctgggcacccactctagcacactgttcttgactcccagcgaaggcaccccacttctagatgagacagggcatcttccattggctggggattgggtggcaggatattcgagtaaccaccgtcaccataatccgttagaccagaacatgatattcatctggatcagcccaaactgttgttgacatggtcccggggattaatcatgatccgggttgtgctgcccaactgctaggtgatttgggaagtcatttagcctccatggccctcggtttctccaacctgtactctaggaagagtagtttccgggagcattatggaaaggggatggagggtgccatgcgttagaccttgtgcctctctgttcacagtggttctagatgactcgaagcgggtggccaagcgtaagctgattgagcagaaccgggagcggcggcggaaggaggagatgatccgatcactgcagcagcgaccagagcccactcctgaagagtgggatctgatccacattgccacagaggcccatcgcagcaccaatgcccagggcagccattggaaacagaggcggaaattcctggtaaggagaaagggggcatggggagagcagtagccaggtggcagggagaagagagtgagctcggagtcttgcctcctccaggaagtcttcttagtgtaatccaacccaaaatacatactcttcacacttttgctgtccagattttatacacttgtgtttgtgtccttgctgtctggactgtctactccatccaactgggagctcaatgaggacagggccttgccttcctcatcgaatttccagggagcgggagcgacctttcttctttttcctgcccttagtgactgggaggagagggtaaggatacagttatgtcacagtatttttgagcacctgctgggtgccaggcattatgttaggccctggtcaagctagttgctaagtaaatgatgagtttgggaccaggtgcagtggctcatgcctgtaatcccagcaatttgtgagaccaaggtgggaggatcgcttgagcccaggagtttgagaccagtctgggtaacatacagagatcccacctctatgaataattttttttttttttgatacggagtctcactctcacccaggctagagtgcagtggcacgatctcggctcaccgcaacctccgcctcctgggttcaagcgattctcccgcctccgtctcccgagtagttgggattacaggcactggccaccatgcctggctaatttttgtgtttttagtagagacagggtttcaccatgttgaccaggctggtctcgaactcctgacctcaagtgatccacccgcctcggcctcccaaagtgctgtgattacaagatgtgagccaccatgcccaccctctatgaataatttttttttttttttgagttggagtttcgctcttgttgtccaggctggagtgcagtggcacagtcttggctcaccgcaacctctacctcccggcttcaagcgattctcctgcctcagcttcccaaatagctgggattacaggcgtgcgccaccacgcccggctaattttgtatttttagtagagacggtgtttctccatgttggtcaggcttgtctgaactcgcaacctcaggtgatctgcctgccttggcctcccaaagtgctgggattacaggtgtgagctactgctcccggcctctctacgaataattttaaaattagctgggcatgggggtgtgtgcctgtggtcccagctactcgggaggctgaggcaggaggatcccctaagcctgggaggtcgaggctgcagtaagccatgattacaccgctgcactccagcccaggcaacagagcaagaccctctctcaaaaaatatgatcagtttgggaggagatggacagttggctatacgtggtgaaggaaggcagaaaaccagcacctggttcatggtggagcatgccggggggtggcacagtgcacactgttaagggcacgggctctgattccaagcagatgtgtaacagtcacgagtcagactgcccaagttcaaaccctggtcctaccacttgctggtcatatgactttaaccttattatttagctgccccatgcctcagtttccacatctgtgaaatggtgattattataattattccttttaggattatggtcaggatgaaataagacatgtaaaacatgtagcctgatgcctgatcatatattaagtattcagtcattatagctgctactactgttactaccgttgttattattagctgacttggagctctggttctggtctattctctgctcaagatgaaggaaaagctttgggcctgggactcaggcacgggcggcccctcttccccaagctgccttggagctccccctggtgggcagggagcctcagtgagaggctgaaaggggtctgcggccccagctgacccccgtctttctctctagcccgatgacattggccagtcacccattgtctccatgccggacggagacaaggtggacctggaagccttcagcgagtttaccaagatcatcaccccggccatcacccgtgtggtggactttgccaaaaaactgcccatgttctccgaggtgagtggcagaagtggggagagatgtgatgctgtgctggagggaaacctgctcccccggtcacccagtacaggctcatctgaggttctctggacaaggagcaattcctgtaggtcaacatacacagataacatacacagacacacacacacacatgcatacacatacacccagcacacaggcacacatgcagacacatacacggacacacacacacacctagcatacagatacgtacacagacacacatacacacacacatacacccagcacacagacacacacacacctagtacacaaacacacacacagatacatagaaacacacacagacatatacacccagcacacagacacacacacacacacagacacacacccagcacacaggcacacacacacacacacctagcacacagccacacagatacatagacacacacacacagatacagacacacacacacacacagacatatacacctagcacacagacacacagatacatagacacacacctagcacacagacacacacacacagacacacccagcacacaggcacacacacacacacacacctagcagacacacacatagatacatacagacacacacacaaacacacaggcacacacacacagcatacagacacacgccaaggtctggctgctctaagaaatcagccggctccaagtgctcccctccacagcccctcatccttcaagtctatgcggccacccaactccaggcagcctgaaagttctcattttccagagcactagtgctggagacaggctgccctactagccatgtgacctggggtaagttacctccatcccctgtgcctcagtgttcccatctggagtgggctggggataatgatgggtgctaactcacaggcataatttttttttcttttttgagacagattttcgttctgtcacccaggctggagtgcagtgacgcgatctgggctcactgcaacctccgcctcctgagttcaagcaattctcctgccttagcctcctgagtagctgggactacaggcatgtgccaccacgcccaactaattttgtatttttagtagagatgggtttcaccatgtatgttggccaggctggtctcgaactcctgacctcaagtgatccacccgccttggcctcccatagtgctggcattatagtcgtgagccactgcgccgggcctcacaggcataactgtgaggcttaaatggaatagggcatgcacatggcccaatacaaggtcagccgttcagagtccatgggggccttgcgggcctcacggctcccgtaggacactctaggggagactcaaggacgcggggaggggtatgctgagtgctcctgtggccctgccgctccacagctgccttgcgaagaccagatcatcctcctgaaggggtgctgcatggagatcatgtccctgcgggcggctgtccgctacgaccctgagagcgacaccctgacgctgagtggggagatggctgtcaagcgggagcagctcaagaatggcggcctgggcgtagtctccgacgccatctttgaactgggcaagtcactctctgcctttaacctggatgacacggaagtggctctgctgcaggctgtgctgctaatgtcaacaggtacctgctgattagtcgggagggctcagaagcttccaggggtcccagagattggctggaccctgggcctgttgctcaactccctcctgaatcttcttctgggctacctctctgtcacctgggccatcccctatcccctgttccttgctctgtcacacacttctcactcgttccccaggcccatcccttgcctccccatccctgctctgtgccttttcctgtctttgtctccttccttctcgctgccctgtccctctgtcactcacattcccctttgttccccactccccactttgttctcagccaccttccatcccctcatccctcctctgtctcccagtcccatctcttacccctcagtcccctccctaaccccatctgcaccccgcctctctgaccaccaacctcagtcctccccactccaaggctcctctctctcccccagcccccggcctgtccctctgtcctccttgcattgccccctccccccagtacccccctgcccctctccacttcccagctgcctccctctccctgtgcttctcctgtccacgtctctcagggggagcttctcccctcccctcccccagcctctctgcctctatctcccctctagtcctttcttcccacgtccccacacctcaccctccccatctccaggccttcggccagcccctcgcccctcacgcccctcttccctcacagaccgctcgggcctgctgtgtgtggacaagatcgagaagagtcaggaggcgtacctgctggcgttcgagcactacgtcaaccaccgcaaacacaacattccgcacttctggcccaagctgctgatgaaggtgactgacctccgcatgatcggggcctgccacgccagccgcttcctccacatgaaagtcgagtgccccaccgaactcttccccccactcttcctcgaggtctttgaggatcaggaagtctaaagcctcaggcggccagagggtgtgcggagctggtggggaggagcctggagagaaggggcagagctgggggctgagggagacccccccacaccccttctctccttcctctcgtccttggatagattcagctcccacacacacacccgcactgcccaggtccctcctcagacctccagccctgggacagggcaaacaactgaacttgctatggaaaggacagtgtgggaggctgggggagctgtgtcctgcagttcccaggaccccatcctctcagaaggtaggggaagggcgggaggattgagaagggacaagccaccttgaccgtaggggaaggaggaatgtgggctgggggaagatgccctcaactcaccccctacacacacatgagagagagcccccacccagttccttggcctaggtctcccctccaggctgagggcctctctacttccccagatgcctgggtgcaaagaacggcttggcttggctcctcctctggaggttaaaatttatagtcattctaactgcactttggaaaccaagcaaggggagaagacaaatgaagaaaaactagacagagagaaaaatacaaaaaagagagagcgagcgatagagagagatgatattaagttattaactgaggctgaccagaggggaggaccccccctttaccaccccatgcactttgcgagctgccccttcttcccccacatcagagagaaatgcccccacaccagagccccaagggtagggctgccgatcagagctgtgagttaacacaacagggtcctggccaccccccttgccataccccgccctctgtgcccctttggcaccccccaaccctagtatgtcctctgctttctgccactcgtgcccgctgagttccatctacctctcatgctggatgccagctggcccctcaccagcctgccctgctgcccacacagctcccctttaagtgcccagccctaggggcctctccccatccacctcctccttccacaccttggcacccacccaggaaaaaactgtggctccaactcctaccctccttatatcctgcagtattagctagaaaccggatgctgctgcattggttgggtcgggggtaggagggctgtgcgtgagcgtctcccagaaccctccacccctttagcactctgtttccctgtttcccatctgtcttctgggctctctctaacctctgccctcctccccagctcctactcactgcactaactctgggcgggcaggtaccagaatgggggtgtttagataagtgacacttagttggggccccaggggaggggtggtcggtgctcctttttctttaaagctcttttggccagctgcccctctgccccgggaccccttcccctcttcttttctctaattcagggactttggcttgagcccctctcgccctcctggtgagggtgctctgttggtctgcacttgggtgagctgtcctcctccccctccctgtggctgccgcccactcctcaggggagagagggagagaggaggtggtcctcccatgggagcaggaggtggggtgggacagagcagaccagagggtgctgggctcagggctgcatgtcggcagggatggatgggtggacacagatgcccccggaagccatggggattggggcagggggtggggggaggggtgccagggcttcctgcgctttgcactattggggcaaaaatgtcttaagcagtggggaacctgccaccccaccctgaccctcagcctgccacagccccctacacacacacacacacacacacacacacacacacacacacggacatgcacacacggacatgggaaggcaatgctatgctgcccgtcagggcactgtccttccccaatcgttcaggtgttccaacaggggtggagggcctggaggagcacccgctgtcacctgtgcatgtgcctgtcccaccctgctggggcctcgggctgcccgcgctgtctttgtctctatcctctctctctctcctggagtactgaatcctgtattactccagtcccatgggtaggccctcttgtaccttcctaccacgcctgggggcccagtggaattcctgacctgtctgctgtcttccccatccctccatccccaccccaacccctccatccccattctcagccatggacacggcagagaaaaggccttgaagagccttagcctcttataggcacttgggactcccccaccctccccaatcatatgagctgtgatcccatcctccccggacccctcccttccccctcggtgatgtggggtgtatgtgtgcgttcctctgcgtgaatgtgtgagtgagtacacatggtaggggaggagccagggcgactcaggagtgccacgcacctgctctagagcggcagctgtcccagtccctgctgtggaagtgggggacagggccctctcctgggggccattggtgctaatgagggggatggccttgatgtgggtgctcagcatgcctcccccagtattggcccggggcactagggcaggcagggtggagcagcaggtgcagtatcggtgggaggacgggttgctgggaataggacgagggggccaggccaggacaaggggttgccagagccatgaccactaccccgcccccaccacccgcctctccatctcagtattgcccctcccatcactcataacacacatacctcatccagcctcctccctgctcagacttggggagggtgggggaggagcccctaccccttctcctggtggcgggtctgcagggctgggagagggcagggcgttgtgagagagagaccgtccataaggaggacagtaactcctgccctgggaactcctgggcgggggggagggggacactgcccagaggcgctactgaatgtatgagaagctggtgctgggctggggggaggggggttgtggccagaaacagggaaggaggtaggtctcttccccagggaggggtgggaccggcaggggtgacttgaggggctcctactcctgccccacgttgacaatcagtatgtctgttatgtgcgatttttcaccccgttgtgttttgggtcaggattttaaagaaagatatttttatggtaattgttgctcgtctattttactatatatttatgtaataaatatatgatgaaaataacccccttgggcaccccccttagacttgtgtgctgtttccctatatcctcccatctgctggcagagtacccaccccacaaactgaccagatggagaggtggccccccccagccttggcagtatttccaccccaccccccaaacgagcacacaccacagaagccagctcagctgtgaactattggatttgagacaggaacagaacaaatcagagggccaggggagggttgtgggggagacagagtggtttaaataggggaggaggggaagttcggtgatgggggagggaggcaggtatttacaagaaggctcagggggccagaggctcatcttggaatattttataacaatataaataagattctggtttgcttttccttttcgtctcgtaaaggagagagaagtgcagagttcgattctgtacaagggggcagcggcagaaggccggccgggcgggtcactgggcgtccacccggaaggacagcagcttctcggaatgcatgttgttcagggtccgcaggtccggcagcttgagcagcagcttggtgaagcgggaagtctccaagggccggttcttcagcaccagagcccgaagagcccgcagcagcgtctcctggagctgctccaccgaagcggaattctccatgcccgagcggtctgtggggaagacgacagcagtgaggcggactccccgagctcctctgaggaggaaccggaggtctgcgaggacctggcaggcaatgcagcctctccctgaagccccccagaaggccgatggggaaggagaaggagtgccataccttctcccaggcctctgccccaagagcaggaggtgcctgaaagctgggagcgtgggctcagcagggctggtcacctcccatcccgtaagaccaccttcccttcctcagcaggccaaacatggccagactcccttgctttttgctgtgtagttccctctgcctgggatgcccttccccctttctctgcctggcaacatcttacttgtcctttgaggccccaactcaagtgtcacctccttccccagctcccccaggcagaaatagttgtctgtgcttccttggttcatgcttctactgtgacacttatctcactgttttataattagtcgggcatgagtctgtttcccaagctagactgtgtctgaatcatgtctgtatccccagtgcccggtgcagggcctggcatagagtaggtactccataaaaggtgtgttgaattgaactgcgtctgcctcctcccccgggtcaggcgagagcctgacctacctgcagagacaagcaccaccgcggtgaagaggcccagctcctcctcggtaagcgccagggagttgagcttctcgctgaagtcgaacatggcactgagcaggtctcccatgcccatggcaccaagctcctgcaggctgtaggtggtgcggcttaggaacatcactgtctggtccttcacgttgaacaacgaagcaaagcgcaccatcagcacctaggagggaaggggaacagtcatcctgggtgtggtgggaggagcactgaccaaatcgcccctgtagtttgccagagggtttagcggtgctgccttcgatttctcagtagagtgggggttgtttctgaatggccaatgagggagcccaggtggaaggatggctttgggatccaataagcctgaatctgagtgtcagctttgtcactacctgtgaccttgggcaaggcattcaccaaagttaatctgctcttgtctagaatgggggcagcagtgcacccaaggcattatttcagtgtaatgggttgtgattaaattccagctgagatgacagaagtcccagccatcaagaggaagcagcaggagccgctcagcccctttcaccaatcaggctataaggacaaagatactgggttccaaaacctttcagaggtcctgcccaccccagacagcagggctttctgttggatccttcccaaggtcaaaagcaggaagcgtctgggtgcaatggctcacgcctgtaatcccaatactttgggagtccaaggcgggcagatcacctggggtcaggagtttgagaccagcctggccaacatggcgaaaccctgtctctaataaaaatataaaaattagccaagcgtggtggcgggaacctgtaatcccagctacttggaaggctgaggtaggagaattgcttgaacccaggaggtggaggttgcagtgagtggagatcgcaccattgcactccagcctgggcgacaagcgaaactctgtctcaaaaaaaacaaaaaccagaagcataaacggtcactcacctcaaaggtgccagccttaagcagggtgacttggtcatgctgagaaaggtcacggaagcccgggatgtgtttggcaaactctaccacctcccgcacagcgggcgtgaagctcatggagaaatcctcccagatctcctgcaccgttcgcccactgcgtccatgcgggtacatgttcataggacatgcctgggggaggaaaagattgaaggaggggagtgtcagccaggctgggtcagatggacgccccgagcagagctggaccccagattctgcctgggctaggggctgtggccctgaaggatgggtctttcagataaagtagcaattaggtgccaggtggagattagggattcccaggcagagtccagactgcaaggcaagacattttctcctgggaagatgctatccccacactcagcctccaggaacccccagctgccctacactaagtccattctgccaggcccccccaatcttcttaacgcactcgcccgcccccatgcccttaccagcagaacattctttgagttgccctgccggggactgttggcaggtgccttgccttctggggctgcatacacgtgggtggggcatagacggtgcccgttgctgttggactggtggcagctgtggtgtgcagggccaggaggccaggtgggagggtaggaggagggagcctggcgcagaccatttagggcctcgttatgacgctgggcagccaaggtgttgttgtcattgggggcaggtgggcagccctgattttcccagcgatgtggggtggtggctggagggctacctgatgcatggttggcattgaagttgccaggtgagctgcccagcttgtcatgggcgtaggtgaagatctctcgatgggcccgggccacctgggatatcacatcctccactgtgggctcagggcttggggatctgggaggcgtcagctgttgtggaaactgggagaagcccaccaggggtgaggggaccggagcagggggtggcgaggggcccatggggcctggggtggggtgctgggtgggtgaagtctccagcgggcactggctgctcaactggttgttggccaggttcatggcactctgcatctcagcaagcatccgctgcttctctcgtttggggatgcgcccaaaacgcacagctgcaacaggatgagaacagcatcaggaagttctcaaccatgctcacgtgcttctcttccttccttcctcctgaaagggcaaggccctgaaggcttggggtttcacatcaaaactaaaaccagcaagtccccacccatcaagggggtttccctaggagggattgctggtaggaggtgacccgagggaccaatgggatagaagtatatgttgacccaagcaaatgaaggatggacatcccctggcacatgtgattcacagtatgatgtgtctccatttgtgacttttttaaagggaaggattaattcagaaactttgggcggaagaaggggggaggatgtggggatgctgcctcaccgtctcgagacatgcccacagagagacacttcttgaagcgacattgctggcagcggttgcgattgatgcggacgatggagcaattctcattcttcagacaccttttgtactggatgttctgctggatgctccgacggaaaaagccctggagggcaggggtggttagtgaccacctccatcatggctgggcctctgtgtccagggggagggggccacctgcccctgcccttacccccagtccgcctcaccttgcagccctcgcaggcgtgcacaccgtagtggaagcccgaggcaacgtccccacacactttacacagtaacaccatgccattcagctctgtggaagagacgggcagcaggtgagcaggagaggccaggctgagtggccacaggtgtggaggctttctgggccggagatccagggagggaaaagctaaggaggaactccagtgttgaggggcactggagtgacaaaactgggctgaagaggggctggtgccactctaggagaaatccctgaagccagaataggtcctggcaagactggtgtcacgtaaaaacccattcccaatctggccctggcctgcttcccttcccccgaatcagctggaaaggtactcactggtgatgttgctggtgctcttgctgggggacactcggctgctgtcctccatggccacttgtagactcccaggggggctcccattatagaaggaggaggaggatgacgacgaggaagatgaggaagaaggggagccgtcatcactcaggctgggtggaatgctcccaaaggagcgagccgggtcttgggtgagggagccagtgggggatggtgggaagtaggtgggacagccttgggtcagggactggaagctgccattggagttgtcactatagagggattcagggctggtgcggcttggggaggagccactggagccaatgtaggtgatgacgccacctggagagagaacaaaaggaaagggggtgtcagccgccatgtctccggacctagggtgccactgtgctcatccccacctgtctgcccaaaacattgctggccactcagttcaccatgtggagcccctaatcttggagttaataagcaattccccaacacacagtagacatggcatggccaagcaacacctacgaccctttgcaggccaccttcagcttctgctttcagtatgaggcatgacccctgtggcatctcgcatatgtgccccccttccttagttgccttccttgggaatatcgactgcagctaatgacttagttgtcagttgaagatctggggatgggatgggcagctgagcaccattcaaagtgcccagtcctccaaaaacaaaaacccagctgctgattttaacactaagaccattccaggaatgagaccatggaccatggagagataggtagccaacagtaaagagaatggagggtttacaaaagtaagacagtcacattccccccagttggggacatatattctctgaaggaaatgaagggaaggaatctgcccagcctggttcccctggcctcttaagagagtgagccacagtggagtctatccctgtgtccaaaaaggacttcgaggtgcgagttgcaggaggtggaagtacaaactgtccagcctggggctctaaaattcccccttcagatctcagcctggtaacaatgaccttggctctctggccattcagggactttgaccctctggttacattgccaatgaggtggctgtgctcccgtggtattagcaggagaaaaaggtgacctgcctgccacacctccggcaagcacctagattggtctgccatgggcggggtgggagaagggaggatcccaggacacatgtgacctaacacatgccatgccactgtgtctgcagaggcacatgtcttgctcacccactgacacacactgaactgggcagggcggccctaaaatagctcaaggttggtcagggtgaacccagctccttggaaaatagttgcacaacagatcagctcccccggtttcagggctgaggtgggggatggaatcattagttggcagtaaatgaagttgacctagttcacccatcccccaaaaaggagtgagaccttcatgcagaggcttccaacgtggaagtgaggagcatactcaagagtctaggtctaggtctagacccatcactaccaacttattttgtgacctagaggacatcaactcccctctttgggtctcagttttcctttctgtgagaaaaaaaggacagtatcatttcagctatgattgtggggtgcagttgctttggggagcccttagtaggcaaactgcagcttgtctggtggagatgggggtaagacaatgctcgcagaactaaggagagagaagcttggggaacaggaatttgtaatgtggggaagctgagtctaaatgcagtacggtgaagtaggtgcaaataagagtgaagtggaaaggagtgagaagggtggttaggggtgaggtctctttagggagtgtaaaacagaaggccatgaaaggtcaggaatggctccatgttactttgttttggtgatgggggagggggccgggcaggcggaccggaaaaggaggcaggcgggggcggtgagtcagcccagcttcacccagatctcggcggggcggggcagggcgggagctgggccctcagccggcctcacgtccctgctccacgtgtgcctctcgcacgtggctccccaacgaggaaccccggaactcgaggccccgccctcctcgcttcccgtcaatcgagagcagtcgccccgcctcctacccgcccttccccggccaccaggtcgtgggctggaccccgaacgatagcagggccaggacaacctaggggaggagagaagggaacacgcgttgccggggcgaccgggggggcggagctcattatgtaacgaggccgggaggcaacgaccaatggggtggcagccacggcttctgctgaatgaaaacaaacgcagcacgtgggcccggctctagagccatgtgagccctcccggcggccggagccctgtaggtgccctccctcgggccgggcaccacgctctggactcctcaagtgtcgctccctcctgtcactgaggattccccagtgagatccgaacgattctcccagcccctccttccctgaaccccatcgcgccactcttctcagattccctcgcgcctgcaggaactagaggagggggaagacaagaggggagggggtccgttttctgaggccaggcatactacagctgcaggtagtggacagatggggccgtttcggggcactgttccaaagctcccagtccccctaaattcttcgcttcaccacccgtacctcctctccatttcctcctgcccagggattcgaggctcaagggagctttgggactctgaggggtggtgatggggcgtttctgagagcatttccagcccgaacaagccgctctggaaatcccacactaaagcaccgcagcacgttagcaaatctccgggccgagggacaccccagtcccttacaaagttcctctttttataaggcgtagatggaggtggggagacagtgacagggaaaagatgatagtaaagaaatctcagtacctgtgttgttgttggagtccagggtcgtcatgtcttcaccagctgagagcggtcattcaaactggaccttgactcaaactagaggttgcgatcgccgctgttgccccctgggcactggctaagggcggggagtggaccccgcgactcacgatcaggatccgaagcaccctgcagcaaggtcttggggtggccggactgcagccctgcagaagggttggacgttgaggcaacggagttctgctttgcatgggaagagcagagagagtgtgtagggggaatcagcctgcagtagttctggctagaaggtagcaaggagggtcgggtctctgcagtgtacggggtgcctctgcctgccggctccgcagcgctgcggggtggcgaatctggagctcccggtgcaaaagtcccagaggaagagaggttgcaaccaggaagtaagtaggtgatggggagaaacggggcaccgagtcgcaaagaggcgagacgtgtgccctgctacgttccctcggcagtaatatttcactctgccaatctcagccgccttttgcccgagcctttccctgggacagagggctctgcgcaggcgccagcagcccagggttcccgggccgcacgcggcactggagcaggtaccatgtgatcccagggagcgcctcgtgccccagtgacacacttttccaacagccggcacgttgagctcttgcgcgcctgcgcaacgacaagactgtcgggatttgtagtccaccgacaaagtgggcggactgcgtgcctttcccctttctgcctggcaaagcgcttgccgggacctgggaggagctgagagtggggtggggtggggtgcgctgaagagtcagggtggcgtgtttagaaagcctgtatggcaggggcatgtgaatttctggggagggactggcaagcttgtttgctgtctgggagatcaaagctaagaggccctttctgcaaaccttgcaaacgtgagggcttcacgtgattgcaggactgacctcgtcctgaggttactggtgaccgggagagagagaagccggggagggagatttccctggagtcaggagcttaggctgccctctgcttcagggcaaagtccagagaaggaaaggaaatgtgaccccctttcccttctactcgccttagggagaacacctccaggggaaggagttcccacagaggtagggatgtctgtagggactccctgtttgcttgtatgacaccattccacccactccagttgactttggggtgagtcatttccctttgtctgggaaataaaaaggacaacagaggggaactaatagtgaaagtgctttgaggtcctaaagtaatggggaagaggtgaggcagggggtgggggcagagtgacacccctgcccctcggtgctggaggataaaatatgaattccacagaagattactactcagaggggaacatgtagatcatcttaagcctccctctttttactagtggggaacaggaagcttaggagaagtgaccgacccaaggtcagacgtccattgctagtttcatctgcccaccccgaatgggaaggtgggtagatgtacaagtgaaatactgaacaggggttagaaacagccagcattgccgggtgctttggctcatgcctgtaatcccagcactttgtgaggctgaggtgggttgatcacctgaggtcaggagtttgagaccagcctgaccaacacggtgaaaccacgtctctactaaaaatacaaaaattagccggatgtggtggtgggtgcctgtaatcccagctagtcaggaggctgaggcaggagaatcgctagaacccgggaggtggaggttgcagtgagccgagatcgccattgcactccggcctgggggatagagtgagactctgtctccaaaacaaacaaacaaaaaacagccagtatttcgcttcagagcagcaactgtcccatgagtaataacagatctcaagtagaggagatctatcatgttagagggcttgggtcatggaggggatggaagcttcttaggcagcgaagggagagggagcctgagccacctgctgctcccgctaattcctccccagtcccagtgcttctagagagggttttcttcacataggaagcccttctccacaggcagctcctgggatggtattgatggatgcctgggaaacatgaaagccaccgaaaaggtagagaaaaagaatatgggagtccgggggtggtggctgacacctgtaatcccagcattttgggaggctgaagtgggcagatcacctgaggtcaggagttcgagaccagcctggccaacatggtgaaaccccatctctactaaaaatacaaaaattagctgggcgtggtggcgcacgcctgtagtcccagccactcgggaggctgaggcaggagaattgcttgaacccaggagatggagattgcagtgagccgagatcatgccactgcacaacagcctgggcaacagggtgagagtccatctcaaagaaaaaaaaaaaaggccaagtgtggtggtggctcacacctgtaatcccagcacttggggaggccgaggcaggtggatcacccgaggtcaggagtttgagaccagcctggccaacatggagaaacctcgtctctactaaaaatacaaaaattagctgggcgtggtggcgcacgcctgtagtcccagctactctactcgggaggctgaggcaggagaattgcttgaacccgggaggcagaggttgcagtgacctgagatcgcgccagtgcactccagcatgggcaacaagaccgaaactccatctcaaaaaaagaaaaaaaaaaaaagaataataatatgagcacaggagtaaactgggtagtgaggacagtgaggttgactgcaggagcttgaccactcaccctctgactccttgtagaagatgagcttcctggaatgggctaggctttagctttgttctcctgctcccaagaaaagtgggagagagagggcagtgggctcttctctggccctttggcccagagttgggaagctgcagcagagtgtgggagcaactgggaggggctaaaacaaacaaggaaagaggcttttcaggaaaacttggttctcagcctccaccccctctccctccaccctctgggctctggagggaaagctaggaggtgaattgccctgtcctgcccttgcctgctctctgtgaccttgactccaagtcagagccagggccagagcccaggtgtctgtcagggctggactcaaaatcaggacccctggcgtgcatctagctccccacagcacagcaccaccactagcaccctccctttacttggccggggtcctccccaaggcccacagctctgtttgctgctgtggaggtcctacccaccccctgtatacttgctggatgtttgttcttctaggagtgggagctggggtgggtcaagactcctcgcctgctgcaatcagtgagaaggaggagggagcagaggtagagagagctgaaattcagtcagcctgactctcctcttggcaaaacctgggtggttctgcagtctgtgtgtggtgtgaaggcagaggctgggagggagggggcaaaggagaggggttacccccttgctccttccttccttcctttccatttcttatagggcccttccttttctccctcacaagtaattcgggtgtctttcttctacagctggtgagaggagtacagaatgaaaaggcagggttctctcttggccccagaagcttctagtcagtctgtgtaccctgctcctttctctgtcagcagctgctgggagaagggcagaaactctgagacccaaagccaccaaagggaggggggaaaggctgggttgtctggctctgggtgattcggagtagaatcttggtttctctttgacctcaaccttggctgtaagaccttaagacaacaggtgtatctcaacacaaccttcctcacctatccctccagctggacattgctgttcacttctttttttttttgagacagagtcccactctatcgcccaggctggagtgcagtggctcactgcaacctccaccttccgggtttaagccattctcctgtctcagcgtcccaagttgctgggactgcaggagcacgccacaatgcctggctaattttttttatatttttagtagagatggggtttcaccatattagtcaggctggtcttgaactcctgacctaaggtgatccacccacctcagcctcccaaagtgctgggatagcaggcgtgagccaccatgcccggcctgctgttcacttctacacacacacacacacaccccatttctcccatagcccagttcaactcaagaaagcacttaactcttcataaatagtactcagattggatccaggtagaaaagatgcatattcacaacctggtacagcaaggcactgccctggttctgcatacacttccacttggattcccaagtctgggattctggggacgaaccttcccattaggggcagtgttggatcctgcctgtgtgtttccaaatatgtctttaattttccttgatttatttggactgcagaggacagcagacacagaggagaagaaggaaaggtattgagaacactaagctctggtcagttatgtatgtgtgcacgtgtgtgtgtgtgtgtgtgtgattctatgactatgagtgagactgcatgtttgtgtgtgagtgtgaatgctgtgtgtgtgggtgtgcatgtttgatctgagatctgttctccctgtcagtaggttgttctgggtaacagggcaacaccctgtgcaaattctgggtggcctaaatcttgggccaactgcttgactgactgactgactgactgactgactgactgagggtgggtccttgctggaaacaggtcaggcttctgtagatgccttcccatccccctcctttctcaccaagaaaccattgcccagagtagaaacctgtctgcccaggtgatgcaaacctggtatagaaatgctggggatgcccctgaatcagggaaccagccatgtgcctgggagagactcactccctgccctcctaaatccttttctttgtctctaaaaggccagctatctttcccaaccccacccaaagcctggatgttttggggagaactttaagaacatgccacaggaaggacagagtctgagctaacttgtttctcagtgtggtggggggagggggatggagaaagcaagggcgaggcatgagccagggctgggttccatggatgtgttttgcctcagattctatctttacctcactactgctttttccaaggaaaggaaaccataaatatgtattaagtaccaaccgtatgccaggcactgtgcaaagtgttttgtacacattatctcatttaatattcacaacaaccctatgctgtaggtctcattcttattttagagatggggaaactgagacttagagaactttattaacttgcccagggtgccagagggtctaggtgattagtcttgaagctgtaatttgcatagcacttaagactgagaagatgtccatcaaagaatgatagcgcggatggagattattggaggggctaaatctcccctctagctatctcttgaactaccactgtcagcgtcacaatgaaaatggcaatgctggggattcaaccccaggcgtgaagatgaaactctttctgctagcaagactgcccctcctagagagattactgccaccctaggggaacgtctgagcagcaaactcatcctggtgtttcccaagcaatggtgatgcttggaagtgggatatatcaccaagaacagaagcctgaagcaccccttgtccctgtcccagggagtacctcagctttccaaaatctctcttttaaccccaggcacatttcctcttcccctaaactcttcccactccccgtcctacatttccctcatctggttctaaaagtagaaggggcaggaacagggtgcacaaaccacagactgctatagaggtgactaacagaaacaggcgtctgaactctcttctctacccaaaccctctgaatttggggtctgctgctggtggtgaggagagtggggcaagtaggtcagggccctctgaagtcccatggtgcttcattccaggagctgtattaagaagattggttgagggagcgtgtggaaggccaccaaggaccaacaaaagttgtgtccaaagccttaaggaaacagcatcccacttccccatttacctgcttgagcaacgtgcacctctaaaaccagcccttccgaaagccactgtcctgggccaatgcttcttcagcagatgctttgaagaacctgaagaagggtcccctctctcagaacctaggatctcacccacatcacaggatcctggaggaggcatggattgtccttggcagtggagactaagccccagatgaccctttttctggcatccagtacatgctctgctaaggcctcctgtccaatctttgccatgctgctggagccacagtggtatcatcttccaggcccctgcacctgcccattggctgcccttgagcctctgtagaactcagatgcagggagaatgtgggggaggtggaggaaagggagagggggtgctctgcatctgcttccatctctaccctttatcccaagctccatctcaaaccctctccttatccagtgtctctccatcctttgggcctctgcagatcaccattagctgcctggggaggccagaggctcatgacagtcctcgtgagcagaatggacctcggaggagcggtggcctgggcaggcattaggggccttgtgtagcttctgggaggcttacataaacactggctgggatggggaggaaaggggggttgcaatggctgcccagggaaaaaagcaacccccgcccggccggctcagcctgagtggaaagaaggaacaaggcttactttccctcctctcactcctctcccctggtctgcagctgttagtcgggctggaaagactgcggtatcttgggggagggggggcaggagaaggagagagagaggatgcgacttcacaaatttgggatccctcctcctcttctaaattggggggagggcgagtggggaagaagcagtttgccaaagagattttcaatgccgcaggaaggagctttggctcattagaatgcgcagtttgcaccctggaaaaaaaaaatctgtgctggttgcaaaaatgcagacgtgtgtaggggcccagcggagattaaaaaaaaaaaaaaaaagcgctagctctgcaatgcaggatctgcgaagttttggtgcgatgaggaaatgtgggtcgtgctcatttcatttgcttgttcctgctaacctactgtccccctgactctagcatagtctcatagcccagcaagaggcaccgcagcttagaaatggggtcacgagtagggggcagaagcagagagccagaagtgggggtctgtggttagagtgcccagagaaggaccaatggaggttagagggccaggcagatggaagggggcacttcaatgagggatggaggctgaatttgccttttgcacacgcatttgttctgcagctacacaggggttattgggaaagcccttctaggtttcctccagccctcggctcttccccatctccaagtagcagagggactttccccttccggtccactaacctcacagaccactgttgcagaacctttgcttcatgtccccaaacacacaaatccctgaactgtccttgttctaaccctggagggggcacttgctgcgtgtgtgtgtcatcctccttcctagaaagaggggacagggtagcctgatttggggagcccaggctacagggaagccaagtcttggctctgggcagacatcaacacatcaccatgagggctggggtgggctgttctgtgttcttggcttgggaaggtcctttgttcttttgaggcttagggttctgggttgtgaaaacaccaaggggctgcctgggaggaaaatatgcttggggagaccatgtttcttttctgggtgtttgctcccctggtggctcaggagagacaaaaggagacagaagcaggataaagcgcaaggagacaagaagggagccccgcgcgctttccctccttcctcatcttgcctcctgtttctctggcccacggaggaaggggcccagtgtgtttgtgccggctcgaggctcacgcgggctgccggggtcacatggcccgggcatgtgcagcctgctccatttctaccacaacaactcgctcataaacagcccggctgctgcggcggtggcggtggagacatgtgcaagcgagggggtggggcacgtggccctgcccgagccaagggaaggcgctcgctcagcactgcctccacccctccccagcactggcgctgcctcgtcacaggaaattcctagtgctcctgttgctgctgcaaaacatgttttggggaagtgactttcaataaggatggaatcaatggactatttaaaaagagacagaatggataatcagttagagaccgacttacgcctgcccttaccctctcttaagatctctgtactggttagggtggtaccagttccttcctcctatataaaattggaaccatgtaatcccagcactttgggaggccaacgtgggcggatcatttgaggtcaggagttcgagaccagcctggccaacatggtgaaaccccatctctacaaaaaataaaaaaaaattagccaggcatggtagtgggcgcctgtaatcccagctacctgggaggctgaggcatgagaatcgcttgaacccgggaggcggaggttgtagtgagccgagatcatgcaactgcactccagcctgggcaacagagcgaggccctgtctcaaaaaaaaaaaaaaaatggaaccaatcaagtcctcatggtaaacagtggggggaggggctggggttctctaagacagtggttctcaagataagcatagggatctggggtcacctgggaacatgttagaaatgcaaattcccaggccccatcccaggtggattgaatcagaagctctgggagcaaaacccagcaatctgagttttaacaaggcccttgggattctgggaagcctgagacccactgctttaggtcttcggtccctaacaatcagtcctctaggagaatctagcccaagatctggggacatgtcagctgggcgtggtggctcatccctgtaatcccagcactttgggaggctgaggcaggcggatcacttgaggccacgcattggacaccagcctggtcaacatggtgaaaccccgtctctacaaaaaaatacaaaaattagccgggtgtggtgtgtgcctgtaatcccagctgctcaggaggctgaggcaggagaattccttgaactgggaggtggaggttaccatgagccaagatcacacactgcactccagcctgggcgacagagtgagaccctgtctcaaaaaaaaaaaaaaaaaaaaagatctgggggcatgtctaccttccccctttgtgctgcttcatctcaaagtccagccacagggcgtaatcagatttagtttgactcagagtaaaaagcatttattgagtgcctcctgtgtgcagattctggaaatgcgggcaaatggcacaacagtagtaggctaatgagtagctgagatctcaaagaggagtggaaggtactgggtgaggggagagtgaaagaaagaaaaggttagaattttatttgtttatcctttctccatcttacctacttttcttcctgtcccgaggctcctattagaacaaatgattgtggcttaaattgttttgaggctggaggtagaaattaagcccttatctatttttgctggccatggggaccccaagttagttaacagccataggctcttgacttcccatgagtaactaaaagaagatgaggaccatgcacacaggcacacacaaacactccctgcgatctcagatgctagggtagggagaccaagagaaggaatgaagtcccagaaggttggaagttccctgggtaaaatgagtttagcagataacaagcaggaaaagtctttcaataggggagggcggggtcatccctggcctactccaccttcctgagacccagaaactgtggccagaggaaacaaagggtccctaaggcaaatcacaaaagctcctgagaatgaaacctgagcctggaaagagagtagagaatgagggatggacaccagatccaaagggttcccttacacaggcaaatgggggttagggggttgggagggatgtgagccatgcccagcccctctccttgggccttctctccatcacaggcagttctcaggagcagaactcctgttactgtctcagtctgagcagctgactcctggcctctccctgcttcattttttgaggaataagcttttctctgattctcacagagccctttcttttgcttctctgcaaggctttctctctgtgcctgaaaggctctgggctcaaggagcagacagccctgcaggctcaactgcagtgacctacattggctctcccctaggccctgggtgcgggggctgagatttcaagataggaacctgggaatctggcacaggtctacagatgatgacatcaggcagacaggctgcaaaagtggcattgagggactggaccctgaggcaggggatgccataggactatgttctcactttgtcatttgagggctttttatggacaagagatcagaagagatcaaatgcaaaaacacctgagcagtgaccccttggagaggagccagtggtccctgacaggcccagtctctattaatgagatttgggagtggtttctgcctgctccctgttcttgctgaacctacactggtctgctgcaggggactggaaagatgatgtggaagaatgagttcggatttcagctgatttatttcagggaaacgaaggctgggtaaaagtcagatatgcagaaatccacgtactcccaggcttaactataatatagagaccctgtatttctttagactcaatggttctgagaaggatccagaaggagccctcaagattaattaccatttacaaagtccttacctcaggaccctggcaactgaatccctccttccagctaccagccttctggaacagagaaggcagcttctgaaataggtgctttccctctctcccactataagccacagtgtttaggatgaccactgcttccagattgtgtgatttgccctggcaaggaaatcctattgtggggggaggaaatgaggcagtcgtgacacaaagtgatggatgagccttttgcttagcagagagagagagaaagccggcaggctgtgcagaactgagtggctcttgggtccaaagggcttccccttggccaagtcccaccccaaagcccaggaagtccacagcttggcgcccagtcaaggcaaaaacattcctcaggactctgacaggctgggggatggttcccaccacgaggatgggggaggggaaggaaacacgcgggggaggaaatgaccacaaagaagggggtgagggtaagaggtggggagtgagttctcagtgccctgagtcccttttagagagaaaggttgaggctggactcattggcttgtgaaggacttgcagcttcagagcacatgacttctgggtcacccttctgctcagggtcatccctgatgacccaaggtgtcctctggaggcttgttaactcaatctccctccttacgcaggggctgtggttgagcttgggagcccctgagtggctaaaagctggaattgcagttgtgctgggggaggagcccatcgggtctccctctgcctctccacctccgcccctccctttccctctccctaagcccaggactctggaaatagcacctggtaatgggagcgctgacagatgctgagttataggagagcaaatgtcctggctagagtcctcaacattctagtttgatcgcttttgggctgtttcccttgaaaacacgtgccccagcaaggattgaaaaactacctattggtactatgctcactacctgggtgacaggttcagtcataccccaaacttcaccattacacaatatacccttgtaacaaacctgcatatgtaccccctgaatctaaaataaaagttgaaatacacacacggaaaaataggtgccccaggactacttccattgtcttccataaattactgtttaacatgcccctgggtagtgtgcttcctggctactgagatccccctcctagggctccccggcttgtagcttctggaccattcactgtccatgacccctatgaccttggagggagaaatggccccacaataattctgattttaaatttacccctccctacctgcactacttagtcctagttttcctcctctgagccttgcccacaactccttccccaagtcagcctccaaccttgaatgttccctcacccccagttccctacccaatcccccaatcccacatctcctgtaggggataggagtgaggtgaaaaatggacaa

SEQ ID NO: 58 - DNA, 170285 bp, Homo sapiens
gcttcagtttccttgtctgcaaagtggaggcagtaacagttcctacctcatagggttgtctggagggttcactgtgatgttccatgaaagacaaggcttatcttttgggtttttgtttttgtttgtaatggggtctctgtcacccaggttggagtgcagtggtgcgatcatagctcactgcagccttgacctcctggtctcaagcaatcctaagcaatcctcccacctcagcctccagagtagctgggattataggtgcacgccacaacccctggccaatttgtgtatttttagtagagatggggttttgctatgttggacaggctggtcttgatcttgaactcctggcctcaagtgatctgcctgcctcagcctcccagagtgctgggattacaggtgtgagtcattgcacctggccagcaaggcttatgtttactaagtgactgacacattgtaaacatgaaaaaatactaattcttcatattattgcaatcatcttgagttttgaggtgtttcctttaaaataaaggcgaggctgggtgcggtggctcacgcctgtaatcccagcactttgggaggccgaggtgggcagatcacctgaggtcaggagttcgagaccagcctggccaacatggtgaaaccccatctctataaaaatacaaaaattagccgggcgtaatggtgggcacctgtagtcccagctactcgggaggctgaggcaggagaattgcttgtacctgggaggtggaggttgcagtaagctgagatcacaccactgcactccagcctgggtgacagagtgaaacttcatctcaaaaagaaaaaaaaaattaaattaaaaaaataaaataaaggtgaatcccaatgtagagaattgaaatttttctcttcccctactagagttcatactcagtccctttccttgacttttttggttcccctgttttatgaattccacctgcatggacaacaggcaacatatatgagaatggtttttgggtcagtgttgtttttaaagtcatttagcaaaatggaaaatgaggttttacttggatttccttttttttttttttttttttttttgagacagagttttgctcttgttgcccagactagagtgcaatggcacaatcttggctcaccgcaacctctgcttcctgggttcaagcaattcttctgcctcagcctcccaagtagctgggattacaggcatgtgccaccattcccggctaattttttcttttttttttcttttttgagatgaagtctcactcttgtcacccaggctggagtgcaatgcgagctccacctcctgggttcaagcgattctcctgcctcagcctcccgagtagctgggattacaggggcaggcccagctaatttttatatttttagtagagatggggtttcaccatgttggccaggctggtcttgaactcctgacttcaggcagtctgcccgcctgggcctcccaaagtgctgggattacaggcatgagccaccgcgcccggccaaggggtggaccccgccgtggttccaccgcggctcaaacctaggaccttctgcatgtaaagcagatgtgataactgctacactatagaatcgcatgcttttttttttttttttttttttttttgagatggagtctcattctgtcacccaggctggaatgcagtggcgcgatcttggctcactgcaacctctgtgtcctgggttcaagcaattctctgcctcagcctcctgagtagctgggattacaggcgcccaccaccacgcccgggtaattttttttttttttatacggagtcttgctctgtcacccagcctggagtgcagtggcgcgatcttggctcgtggcaagctccacctcctgggttcacgccattctcctgcctcagcctcccgagtagctgggactacagcgcccaccaccatgcccggctattttttttgtatttttagtagagacagggtttcaccgtgttagccaggatggtctcgatctcctgaccttgtgatccgcctgcctcagcctcccaaagtgctgggattacaggcataagccaccgcgcccggcctacgcccaatttttatacttttagtagagacagggtttcaccatgttggccagggtgatcttgaactcctgacctcatgattcatccgccttggcctcccaaagttctgggattataggcatgagccactgcacccaacctcatgcccggctaattttctatttttagtagagacagggtttcttcatgttggtcaggctggtctcgaactcccgacctcagttgatctgcccacctcggcctcccaaagtgttgggattacatgcgtgcgccaccgcgcccggcgacttggatttccaaagctgctattccttaaggcctcacattatcccaggttcaaagctgcctgctctagacatcattcctgcctctgccacaaacactacccagacacccccaacccctcagcagcctgggggctgagggcatatatttctcaggtccttgagcctagtaatcttgggctcatggtgtcaggaggatgccaggtcccctcactgatcttgccttccttgctctccacccctgacccctagtaaactgcatggttggttcaggaaggggaagccatgtcatgatcacagcctgctccatctcccccaccccagggcttctttcgccgcacaatccagaagaacctccatcccacctattcctgcaaatatgacagctgctgtgtcattgacaagatcacccgcaatcagtgccagctgtgccgcttcaagaagtgcatcgccgtgggcatggccatggactgtaaggggcccaggtggagggaatagagccaggtggcctggggtggggatgagttctgggagggcagcttccttccagggtaccctcagagcccacagggcagagtggcaatccagtctaggtcagaatgttcagtgtcttggtccttgctgtcctccttcctgcgcaaaaggaaacaggatccctgtgtgggccccaatgcctacctgccttacaacactcgagggccttagagagggagtcgtttggtagaaagagctcctgggcacccactctagcacactgttcttgactcccagcgaaggcaccccacttctagatgagacagggcatcttccattggctggggattgggtggcaggatattcgagtaaccaccgtcaccataatccgttagaccagaacatgatattcatctggatcagcccaaactgttgttgacatggtcccggggattaatcatgatccgggttgtgctgcccaactgctaggtgatttgggaagtcatttagcctccatggccctcggtttctccaacctgtactctaggaagagtagtttccgggagcattatggaaaggggatggagggtgccatgcgttagaccttgtgcctctctgttcacagtggttctagatgactcgaagcgggtggccaagcgtaagctgattgagcagaaccgggagcggcggcggaaggaggagatgatccgatcactgcagcagcgaccagagcccactcctgaagagtgggatctgatccacattgccacagaggcccatcgcagcaccaatgcccagggcagccattggaaacagaggcggaaattcctggtaaggagaaagggggcatggggagagcagtagccaggtggcagggagaagagagtgagctcggagtcttgcctcctccaggaagtcttcttagtgtaatccaacccaaaatacatactcttcacacttttgctgtccagattttatacacttgtgtttgtgtccttgctgtctggactgtctactccatccaactgggagctcaatgaggacagggccttgccttcctcatcgaatttccagggagcgggagcgacctttcttctttttcctgcccttagtgactgggaggagagggtaaggatacagttatgtcacagtatttttgagcacctgctgggtgccaggcattatgttaggccctggtcaagctagttgctaagtaaatgatgagtttgggaccaggtgcagtggctcatgcctgtaatcccagcaatttgtgagaccaaggtgggaggatcgcttgagcccaggagtttgagaccagtctgggtaacatacagagatcccacctctatgaataattttttttttttttgatacggagtctcactctcacccaggctagagtgcagtggcacgatctcggctcaccgcaacctccgcctcctgggttcaagcgattctcccgcctccgtctcccgagtagttgggattacaggcactggccaccatgcctggctaatttttgtgtttttagtagagacagggtttcaccatgttgaccaggctggtctcgaactcctgacctcaagtgatccacccgcctcggcctcccaaagtgctgtgattacaagatgtgagccaccatgcccaccctctatgaataatttttttttttttttgagttggagtttcgctcttgttgtccaggctggagtgcagtggcacagtcttggctcaccgcaacctctacctcccggcttcaagcgattctcctgcctcagcttcccaaatagctgggattacaggcgtgcgccaccacgcccggctaattttgtatttttagtagagacggtgtttctccatgttggtcaggcttgtctgaactcgcaacctcaggtgatctgcctgccttggcctcccaaagtgctgggattacaggtgtgagctactgctcccggcctctctacgaataattttaaaattagctgggcatgggggtgtgtgcctgtggtcccagctactcgggaggctgaggcaggaggatcccctaagcctgggaggtcgaggctgcagtaagccatgattacaccgctgcactccagcccaggcaacagagcaagaccctctctcaaaaaatatgatcagtttgggaggagatggacagttggctatacgtggtgaaggaaggcagaaaaccagcacctggttcatggtggagcatgccggggggtggcacagtgcacactgttaagggcacgggctctgattccaagcagatgtgtaacagtcacgagtcagactgcccaagttcaaaccctggtcctaccacttgctggtcatatgactttaaccttattatttagctgccccatgcctcagtttccacatctgtgaaatggtgattattataattattccttttaggattatggtcaggatgaaataagacatgtaaaacatgtagcctgatgcctgatcatatattaagtattcagtcattatagctgctactactgttactaccgttgttattattagctgacttggagctctggttctggtctattctctgctcaagatgaaggaaaagctttgggcctgggactcaggcacgggcggcccctcttccccaagctgccttggagctccccctggtgggcagggagcctcagtgagaggctgaaaggggtctgcggccccagctgacccccgtctttctctctagcccgatgacattggccagtcacccattgtctccatgccggacggagacaaggtggacctggaagccttcagcgagtttaccaagatcatcaccccggccatcacccgtgtggtggactttgccaaaaaactgcccatgttctccgaggtgagtggcagaagtggggagagatgtgatgctgtgctggagggaaacctgctcccccggtcacccagtacaggctcatctgaggttctctggacaaggagcaattcctgtaggtcaacatacacagataacatacacagacacacacacacacatgcatacacatacacccagcacacaggcacacatgcagacacatacacggacacacacacacacctagcatacagatacgtacacagacacacatacacacacacatacacccagcacacagacacacacacacctagtacacaaacacacacacagatacatagaaacacacacagacatatacacccagcacacagacacacacacacacacagacacacacccagcacacaggcacacacacacacacacctagcacacagccacacagatacatagacacacacacacagatacagacacacacacacacacagacatatacacctagcacacagacacacagatacatagacacacacctagcacacagacacacacacacagacacacccagcacacaggcacacacacacacacacacctagcagacacacacatagatacatacagacacacacacaaacacacaggcacacacacacagcatacagacacacgccaaggtctggctgctctaagaaatcagccggctccaagtgctcccctccacagcccctcatccttcaagtctatgcggccacccaactccaggcagcctgaaagttctcattttccagagcactagtgctggagacaggctgccctactagccatgtgacctggggtaagttacctccatcccctgtgcctcagtgttcccatctggagtgggctggggataatgatgggtgctaactcacaggcataatttttttttcttttttgagacagattttcgttctgtcacccaggctggagtgcagtgacgcgatctgggctcactgcaacctccgcctcctgagttcaagcaattctcctgccttagcctcctgagtagctgggactacaggcatgtgccaccacgcccaactaattttgtatttttagtagagatgggtttcaccatgtatgttggccaggctggtctcgaactcctgacctcaagtgatccacccgccttggcctcccatagtgctggcattatagtcgtgagccactgcgccgggcctcacaggcataactgtgaggcttaaatggaatagggcatgcacatggcccaatacaaggtcagccgttcagagtccatgggggccttgcgggcctcacggctcccgtaggacactctaggggagactcaaggacgcggggaggggtatgctgagtgctcctgtggccctgccgctccacagctgccttgcgaagaccagatcatcctcctgaaggggtgctgcatggagatcatgtccctgcgggcggctgtccgctacgaccctgagagcgacaccctgacgctgagtggggagatggctgtcaagcgggagcagctcaagaatggcggcctgggcgtagtctccgacgccatctttgaactgggcaagtcactctctgcctttaacctggatgacacggaagtggctctgctgcaggctgtgctgctaatgtcaacaggtacctgctgattagtcgggagggctcagaagcttccaggggtcccagagattggctggaccctgggcctgttgctcaactccctcctgaatcttcttctgggctacctctctgtcacctgggccatcccctatcccctgttccttgctctgtcacacacttctcactcgttccccaggcccatcccttgcctccccatccctgctctgtgccttttcctgtctttgtctccttccttctcgctgccctgtccctctgtcactcacattcccctttgttccccactccccactttgttctcagccaccttccatcccctcatccctcctctgtctcccagtcccatctcttacccctcagtcccctccctaaccccatctgcaccccgcctctctgaccaccaacctcagtcctccccactccaaggctcctctctctcccccagcccccggcctgtccctctgtcctccttgcattgccccctccccccagtacccccctgcccctctccacttcccagctgcctccctctccctgtgcttctcctgtccacgtctctcagggggagcttctcccctcccctcccccagcctctctgcctctatctcccctctagtcctttcttcccacgtccccacacctcaccctccccatctccaggccttcggccagcccctcgcccctcacgcccctcttccctcacagaccgctcgggcctgctgtgtgtggacaagatcgagaagagtcaggaggcgtacctgctggcgttcgagcactacgtcaaccaccgcaaacacaacattccgcacttctggcccaagctgctgatgaaggtgactgacctccgcatgatcggggcctgccacgccagccgcttcctccacatgaaagtcgagtgccccaccgaactcttccccccactcttcctcgaggtctttgaggatcaggaagtctaaagcctcaggcggccagagggtgtgcggagctggtggggaggagcctggagagaaggggcagagctgggggctgagggagacccccccacaccccttctctccttcctctcgtccttggatagattcagctcccacacacacacccgcactgcccaggtccctcctcagacctccagccctgggacagggcaaacaactgaacttgctatggaaaggacagtgtgggaggctgggggagctgtgtcctgcagttcccaggaccccatcctctcagaaggtaggggaagggcgggaggattgagaagggacaagccaccttgaccgtaggggaaggaggaatgtgggctgggggaagatgccctcaactcaccccctacacacacatgagagagagcccccacccagttccttggcctaggtctcccctccaggctgagggcctctctacttccccagatgcctgggtgcaaagaacggcttggcttggctcctcctctggaggttaaaatttatagtcattctaactgcactttggaaaccaagcaaggggagaagacaaatgaagaaaaactagacagagagaaaaatacaaaaaagagagagcgagcgatagagagagatgatattaagttattaactgaggctgaccagaggggaggaccccccctttaccaccccatgcactttgcgagctgccccttcttcccccacatcagagagaaatgcccccacaccagagccccaagggtagggctgccgatcagagctgtgagttaacacaacagggtcctggccaccccccttgccataccccgccctctgtgcccctttggcaccccccaaccctagtatgtcctctgctttctgccactcgtgcccgctgagttccatctacctctcatgctggatgccagctggcccctcaccagcctgccctgctgcccacacagctcccctttaagtgcccagccctaggggcctctccccatccacctcctccttccacaccttggcacccacccaggaaaaaactgtggctccaactcctaccctccttatatcctgcagtattagctagaaaccggatgctgctgcattggttgggtcgggggtaggagggctgtgcgtgagcgtctcccagaaccctccacccctttagcactctgtttccctgtttcccatctgtcttctgggctctctctaacctctgccctcctccccagctcctactcactgcactaactctgggcgggcaggtaccagaatgggggtgtttagataagtgacacttagttggggccccaggggaggggtggtcggtgctcctttttctttaaagctcttttggccagctgcccctctgccccgggaccccttcccctcttcttttctctaattcagggactttggcttgagcccctctcgccctcctggtgagggtgctctgttggtctgcacttgggtgagctgtcctcctccccctccctgtggctgccgcccactcctcaggggagagagggagagaggaggtggtcctcccatgggagcaggaggtggggtgggacagagcagaccagagggtgctgggctcagggctgcatgtcggcagggatggatgggtggacacagatgcccccggaagccatggggattggggcagggggtggggggaggggtgccagggcttcctgcgctttgcactattggggcaaaaatgtcttaagcagtggggaacctgccaccccaccctgaccctcagcctgccacagccccctacacacacacacacacacacacacacacacacacacacacggacatgcacacacggacatgggaaggcaatgctatgctgcccgtcagggcactgtccttccccaatcgttcaggtgttccaacaggggtggagggcctggaggagcacccgctgtcacctgtgcatgtgcctgtcccaccctgctggggcctcgggctgcccgcgctgtctttgtctctatcctctctctctctcctggagtactgaatcctgtattactccagtcccatgggtaggccctcttgtaccttcctaccacgcctgggggcccagtggaattcctgacctgtctgctgtcttccccatccctccatccccaccccaacccctccatccccattctcagccatggacacggcagagaaaaggccttgaagagccttagcctcttataggcacttgggactcccccaccctccccaatcatatgagctgtgatcccatcctccccggacccctcccttccccctcggtgatgtggggtgtatgtgtgcgttcctctgcgtgaatgtgtgagtgagtacacatggtaggggaggagccagggcgactcaggagtgccacgcacctgctctagagcggcagctgtcccagtccctgctgtggaagtgggggacagggccctctcctgggggccattggtgctaatgagggggatggccttgatgtgggtgctcagcatgcctcccccagtattggcccggggcactagggcaggcagggtggagcagcaggtgcagtatcggtgggaggacgggttgctgggaataggacgagggggccaggccaggacaaggggttgccagagccatgaccactaccccgcccccaccacccgcctctccatctcagtattgcccctcccatcactcataacacacatacctcatccagcctcctccctgctcagacttggggagggtgggggaggagcccctaccccttctcctggtggcgggtctgcagggctgggagagggcagggcgttgtgagagagagaccgtccataaggaggacagtaactcctgccctgggaactcctgggcgggggggagggggacactgcccagaggcgctactgaatgtatgagaagctggtgctgggctggggggaggggggttgtggccagaaacagggaaggaggtaggtctcttccccagggaggggtgggaccggcaggggtgacttgaggggctcctactcctgccccacgttgacaatcagtatgtctgttatgtgcgatttttcaccccgttgtgttttgggtcaggattttaaagaaagatatttttatggtaattgttgctcgtctattttactatatatttatgtaataaatatatgatgaaaataacccccttgggcaccccccttagacttgtgtgctgtttccctatatcctcccatctgctggcagagtacccaccccacaaactgaccagatggagaggtggccccccccagccttggcagtatttccaccccaccccccaaacgagcacacaccacagaagccagctcagctgtgaactattggatttgagacaggaacagaacaaatcagagggccaggggagggttgtgggggagacagagtggtttaaataggggaggaggggaagttcggtgatgggggagggaggcaggtatttacaagaaggctcagggggccagaggctcatcttggaatattttataacaatataaataagattctggtttgcttttccttttcgtctcgtaaaggagagagaagtgcagagttcgattctgtacaagggggcagcggcagaaggccggccgggcgggtcactgggcgtccacccggaaggacagcagcttctcggaatgcatgttgttcagggtccgcaggtccggcagcttgagcagcagcttggtgaagcgggaagtctccaagggccggttcttcagcaccagagcccgaagagcccgcagcagcgtctcctggagctgctccaccgaagcggaattctccatgcccgagcggtctgtggggaagacgacagcagtgaggcggactccccgagctcctctgaggaggaaccggaggtctgcgaggacctggcaggcaatgcagcctctccctgaagccccccagaaggccgatggggaaggagaaggagtgccataccttctcccaggcctctgccccaagagcaggaggtgcctgaaagctgggagcgtgggctcagcagggctggtcacctcccatcccgtaagaccaccttcccttcctcagcaggccaaacatggccagactcccttgctttttgctgtgtagttccctctgcctgggatgcccttccccctttctctgcctggcaacatcttacttgtcctttgaggccccaactcaagtgtcacctccttccccagctcccccaggcagaaatagttgtctgtgcttccttggttcatgcttctactgtgacacttatctcactgttttataattagtcgggcatgagtctgtttcccaagctagactgtgtctgaatcatgtctgtatccccagtgcccggtgcagggcctggcatagagtaggtactccataaaaggtgtgttgaattgaactgcgtctgcctcctcccccgggtcaggcgagagcctgacctacctgcagagacaagcaccaccgcggtgaagaggcccagctcctcctcggtaagcgccagggagttgagcttctcgctgaagtcgaacatggcactgagcaggtctcccatgcccatggcaccaagctcctgcaggctgtaggtggtgcggcttaggaacatcactgtctggtccttcacgttgaacaacgaagcaaagcgcaccatcagcacctaggagggaaggggaacagtcatcctgggtgtggtgggaggagcactgaccaaatcgcccctgtagtttgccagagggtttagcggtgctgccttcgatttctcagtagagtgggggttgtttctgaatggccaatgagggagcccaggtggaaggatggctttgggatccaataagcctgaatctgagtgtcagctttgtcactacctgtgaccttgggcaaggcattcaccaaagttaatctgctcttgtctagaatgggggcagcagtgcacccaaggcattatttcagtgtaatgggttgtgattaaattccagctgagatgacagaagtcccagccatcaagaggaagcagcaggagccgctcagcccctttcaccaatcaggctataaggacaaagatactgggttccaaaacctttcagaggtcctgcccaccccagacagcagggctttctgttggatccttcccaaggtcaaaagcaggaagcgtctgggtgcaatggctcacgcctgtaatcccaatactttgggagtccaaggcgggcagatcacctggggtcaggagtttgagaccagcctggccaacatggcgaaaccctgtctctaataaaaatataaaaattagccaagcgtggtggcgggaacctgtaatcccagctacttggaaggctgaggtaggagaattgcttgaacccaggaggtggaggttgcagtgagtggagatcgcaccattgcactccagcctgggcgacaagcgaaactctgtctcaaaaaaaacaaaaaccagaagcataaacggtcactcacctcaaaggtgccagccttaagcagggtgacttggtcatgctgagaaaggtcacggaagcccgggatgtgtttggcaaactctaccacctcccgcacagcgggcgtgaagctcatggagaaatcctcccagatctcctgcaccgttcgcccactgcgtccatgcgggtacatgttcataggacatgcctgggggaggaaaagattgaaggaggggagtgtcagccaggctgggtcagatggacgccccgagcagagctggaccccagattctgcctgggctaggggctgtggccctgaaggatgggtctttcagataaagtagcaattaggtgccaggtggagattagggattcccaggcagagtccagactgcaaggcaagacattttctcctgggaagatgctatccccacactcagcctccaggaacccccagctgccctacactaagtccattctgccaggcccccccaatcttcttaacgcactcgcccgcccccatgcccttaccagcagaacattctttgagttgccctgccggggactgttggcaggtgccttgccttctggggctgcatacacgtgggtggggcatagacggtgcccgttgctgttggactggtggcagctgtggtgtgcagggccaggaggccaggtgggagggtaggaggagggagcctggcgcagaccatttagggcctcgttatgacgctgggcagccaaggtgttgttgtcattgggggcaggtgggcagccctgattttcccagcgatgtggggtggtggctggagggctacctgatgcatggttggcattgaagttgccaggtgagctgcccagcttgtcatgggcgtaggtgaagatctctcgatgggcccgggccacctgggatatcacatcctccactgtgggctcagggcttggggatctgggaggcgtcagctgttgtggaaactgggagaagcccaccaggggtgaggggaccggagcagggggtggcgaggggcccatggggcctggggtggggtgctgggtgggtgaagtctccagcgggcactggctgctcaactggttgttggccaggttcatggcactctgcatctcagcaagcatccgctgcttctctcgtttggggatgcgcccaaaacgcacagctgcaacaggatgagaacagcatcaggaagttctcaaccatgctcacgtgcttctcttccttccttcctcctgaaagggcaaggccctgaaggcttggggtttcacatcaaaactaaaaccagcaagtccccacccatcaagggggtttccctaggagggattgctggtaggaggtgacccgagggaccaatgggatagaagtatatgttgacccaagcaaatgaaggatggacatcccctggcacatgtgattcacagtatgatgtgtctccatttgtgacttttttaaagggaaggattaattcagaaactttgggcggaagaaggggggaggatgtggggatgctgcctcaccgtctcgagacatgcccacagagagacacttcttgaagcgacattgctggcagcggttgcgattgatgcggacgatggagcaattctcattcttcagacaccttttgtactggatgttctgctggatgctccgacggaaaaagccctggagggcaggggtggttagtgaccacctccatcatggctgggcctctgtgtccagggggagggggccacctgcccctgcccttacccccagtccgcctcaccttgcagccctcgcaggcgtgcacaccgtagtggaagcccgaggcaacgtccccacacactttacacagtaacaccatgccattcagctctgtggaagagacgggcagcaggtgagcaggagaggccaggctgagtggccacaggtgtggaggctttctgggccggagatccagggagggaaaagctaaggaggaactccagtgttgaggggcactggagtgacaaaactgggctgaagaggggctggtgccactctaggagaaatccctgaagccagaataggtcctggcaagactggtgtcacgtaaaaacccattcccaatctggccctggcctgcttcccttcccccgaatcagctggaaaggtactcactggtgatgttgctggtgctcttgctgggggacactcggctgctgtcctccatggccacttgtagactcccaggggggctcccattatagaaggaggaggaggatgacgacgaggaagatgaggaagaaggggagccgtcatcactcaggctgggtggaatgctcccaaaggagcgagccgggtcttgggtgagggagccagtgggggatggtgggaagtaggtgggacagccttgggtcagggactggaagctgccattggagttgtcactatagagggattcagggctggtgcggcttggggaggagccactggagccaatgtaggtgatgacgccacctggagagagaacaaaaggaaagggggtgtcagccgccatgtctccggacctagggtgccactgtgctcatccccacctgtctgcccaaaacattgctggccactcagttcaccatgtggagcccctaatcttggagttaataagcaattccccaacacacagtagacatggcatggccaagcaacacctacgaccctttgcaggccaccttcagcttctgctttcagtatgaggcatgacccctgtggcatctcgcatatgtgccccccttccttagttgccttccttgggaatatcgactgcagctaatgacttagttgtcagttgaagatctggggatgggatgggcagctgagcaccattcaaagtgcccagtcctccaaaaacaaaaacccagctgctgattttaacactaagaccattccaggaatgagaccatggaccatggagagataggtagccaacagtaaagagaatggagggtttacaaaagtaagacagtcacattccccccagttggggacatatattctctgaaggaaatgaagggaaggaatctgcccagcctggttcccctggcctcttaagagagtgagccacagtggagtctatccctgtgtccaaaaaggacttcgaggtgcgagttgcaggaggtggaagtacaaactgtccagcctggggctctaaaattcccccttcagatctcagcctggtaacaatgaccttggctctctggccattcagggactttgaccctctggttacattgccaatgaggtggctgtgctcccgtggtattagcaggagaaaaaggtgacctgcctgccacacctccggcaagcacctagattggtctgccatgggcggggtgggagaagggaggatcccaggacacatgtgacctaacacatgccatgccactgtgtctgcagaggcacatgtcttgctcacccactgacacacactgaactgggcagggcggccctaaaatagctcaaggttggtcagggtgaacccagctccttggaaaatagttgcacaacagatcagctcccccggtttcagggctgaggtgggggatggaatcattagttggcagtaaatgaagttgacctagttcacccatcccccaaaaaggagtgagaccttcatgcagaggcttccaacgtggaagtgaggagcatactcaagagtctaggtctaggtctagacccatcactaccaacttattttgtgacctagaggacatcaactcccctctttgggtctcagttttcctttctgtgagaaaaaaaggacagtatcatttcagctatgattgtggggtgcagttgctttggggagcccttagtaggcaaactgcagcttgtctggtggagatgggggtaagacaatgctcgcagaactaaggagagagaagcttggggaacaggaatttgtaatgtggggaagctgagtctaaatgcagtacggtgaagtaggtgcaaataagagtgaagtggaaaggagtgagaagggtggttaggggtgaggtctctttagggagtgtaaaacagaaggccatgaaaggtcaggaatggctccatgttactttgttttggtgatgggggagggggccgggcaggcggaccggaaaaggaggcaggcgggggcggtgagtcagcccagcttcacccagatctcggcggggcggggcagggcgggagctgggccctcagccggcctcacgtccctgctccacgtgtgcctctcgcacgtggctccccaacgaggaaccccggaactcgaggccccgccctcctcgcttcccgtcaatcgagagcagtcgccccgcctcctacccgcccttccccggccaccaggtcgtgggctggaccccgaacgatagcagggccaggacaacctaggggaggagagaagggaacacgcgttgccggggcgaccgggggggcggagctcattatgtaacgaggccgggaggcaacgaccaatggggtggcagccacggcttctgctgaatgaaaacaaacgcagcacgtgggcccggctctagagccatgtgagccctcccggcggccggagccctgtaggtgccctccctcgggccgggcaccacgctctggactcctcaagtgtcgctccctcctgtcactgaggattccccagtgagatccgaacgattctcccagcccctccttccctgaaccccatcgcgccactcttctcagattccctcgcgcctgcaggaactagaggagggggaagacaagaggggagggggtccgttttctgaggccaggcatactacagctgcaggtagtggacagatggggccgtttcggggcactgttccaaagctcccagtccccctaaattcttcgcttcaccacccgtacctcctctccatttcctcctgcccagggattcgaggctcaagggagctttgggactctgaggggtggtgatggggcgtttctgagagcatttccagcccgaacaagccgctctggaaatcccacactaaagcaccgcagcacgttagcaaatctccgggccgagggacaccccagtcccttacaaagttcctctttttataaggcgtagatggaggtggggagacagtgacagggaaaagatgatagtaaagaaatctcagtacctgtgttgttgttggagtccagggtcgtcatgtcttcaccagctgagagcggtcattcaaactggaccttgactcaaactagaggttgcgatcgccgctgttgccccctgggcactggctaagggcggggagtggaccccgcgactcacgatcaggatccgaagcaccctgcagcaaggtcttggggtggccggactgcagccctgcagaagggttggacgttgaggcaacggagttctgctttgcatgggaagagcagagagagtgtgtagggggaatcagcctgcagtagttctggctagaaggtagcaaggagggtcgggtctctgcagtgtacggggtgcctctgcctgccggctccgcagcgctgcggggtggcgaatctggagctcccggtgcaaaagtcccagaggaagagaggttgcaaccaggaagtaagtaggtgatggggagaaacggggcaccgagtcgcaaagaggcgagacgtgtgccctgctacgttccctcggcagtaatatttcactctgccaatctcagccgccttttgcccgagcctttccctgggacagagggctctgcgcaggcgccagcagcccagggttcccgggccgcacgcggcactggagcaggtaccatgtgatcccagggagcgcctcgtgccccagtgacacacttttccaacagccggcacgttgagctcttgcgcgcctgcgcaacgacaagactgtcgggatttgtagtccaccgacaaagtgggcggactgcgtgcctttcccctttctgcctggcaaagcgcttgccgggacctgggaggagctgagagtggggtggggtggggtgcgctgaagagtcagggtggcgtgtttagaaagcctgtatggcaggggcatgtgaatttctggggagggactggcaagcttgtttgctgtctgggagatcaaagctaagaggccctttctgcaaaccttgcaaacgtgagggcttcacgtgattgcaggactgacctcgtcctgaggttactggtgaccgggagagagagaagccggggagggagatttccctggagtcaggagcttaggctgccctctgcttcagggcaaagtccagagaaggaaaggaaatgtgaccccctttcccttctactcgccttagggagaacacctccaggggaaggagttcccacagaggtagggatgtctgtagggactccctgtttgcttgtatgacaccattccacccactccagttgactttggggtgagtcatttccctttgtctgggaaataaaaaggacaacagaggggaactaatagtgaaagtgctttgaggtcctaaagtaatggggaagaggtgaggcagggggtgggggcagagtgacacccctgcccctcggtgctggaggataaaatatgaattccacagaagattactactcagaggggaacatgtagatcatcttaagcctccctctttttactagtggggaacaggaagcttaggagaagtgaccgacccaaggtcagacgtccattgctagtttcatctgcccaccccgaatgggaaggtgggtagatgtacaagtgaaatactgaacaggggttagaaacagccagcattgccgggtgctttggctcatgcctgtaatcccagcactttgtgaggctgaggtgggttgatcacctgaggtcaggagtttgagaccagcctgaccaacacggtgaaaccacgtctctactaaaaatacaaaaattagccggatgtggtggtgggtgcctgtaatcccagctagtcaggaggctgaggcaggagaatcgctagaacccgggaggtggaggttgcagtgagccgagatcgccattgcactccggcctgggggatagagtgagactctgtctccaaaacaaacaaacaaaaaacagccagtatttcgcttcagagcagcaactgtcccatgagtaataacagatctcaagtagaggagatctatcatgttagagggcttgggtcatggaggggatggaagcttcttaggcagcgaagggagagggagcctgagccacctgctgctcccgctaattcctccccagtcccagtgcttctagagagggttttcttcacataggaagcccttctccacaggcagctcctgggatggtattgatggatgcctgggaaacatgaaagccaccgaaaaggtagagaaaaagaatatgggagtccgggggtggtggctgacacctgtaatcccagcattttgggaggctgaagtgggcagatcacctgaggtcaggagttcgagaccagcctggccaacatggtgaaaccccatctctactaaaaatacaaaaattagctgggcgtggtggcgcacgcctgtagtcccagccactcgggaggctgaggcaggagaattgcttgaacccaggagatggagattgcagtgagccgagatcatgccactgcacaacagcctgggcaacagggtgagagtccatctcaaagaaaaaaaaaaaaggccaagtgtggtggtggctcacacctgtaatcccagcacttggggaggccgaggcaggtggatcacccgaggtcaggagtttgagaccagcctggccaacatggagaaacctcgtctctactaaaaatacaaaaattagctgggcgtggtggcgcacgcctgtagtcccagctactctactcgggaggctgaggcaggagaattgcttgaacccgggaggcagaggttgcagtgacctgagatcgcgccagtgcactccagcatgggcaacaagaccgaaactccatctcaaaaaaagaaaaaaaaaaaaagaataataatatgagcacaggagtaaactgggtagtgaggacagtgaggttgactgcaggagcttgaccactcaccctctgactccttgtagaagatgagcttcctggaatgggctaggctttagctttgttctcctgctcccaagaaaagtgggagagagagggcagtgggctcttctctggccctttggcccagagttgggaagctgcagcagagtgtgggagcaactgggaggggctaaaacaaacaaggaaagaggcttttcaggaaaacttggttctcagcctccaccccctctccctccaccctctgggctctggagggaaagctaggaggtgaattgccctgtcctgcccttgcctgctctctgtgaccttgactccaagtcagagccagggccagagcccaggtgtctgtcagggctggactcaaaatcaggacccctggcgtgcatctagctccccacagcacagcaccaccactagcaccctccctttacttggccggggtcctccccaaggcccacagctctgtttgctgctgtggaggtcctacccaccccctgtatacttgctggatgtttgttcttctaggagtgggagctggggtgggtcaagactcctcgcctgctgcaatcagtgagaaggaggagggagcagaggtagagagagctgaaattcagtcagcctgactctcctcttggcaaaacctgggtggttctgcagtctgtgtgtggtgtgaaggcagaggctgggagggagggggcaaaggagaggggttacccccttgctccttccttccttcctttccatttcttatagggcccttccttttctccctcacaagtaattcgggtgtctttcttctacagctggtgagaggagtacagaatgaaaaggcagggttctctcttggccccagaagcttctagtcagtctgtgtaccctgctcctttctctgtcagcagctgctgggagaagggcagaaactctgagacccaaagccaccaaagggaggggggaaaggctgggttgtctggctctgggtgattcggagtagaatcttggtttctctttgacctcaaccttggctgtaagaccttaagacaacaggtgtatctcaacacaaccttcctcacctatccctccagctggacattgctgttcacttctttttttttttgagacagagtcccactctatcgcccaggctggagtgcagtggctcactgcaacctccaccttccgggtttaagccattctcctgtctcagcgtcccaagttgctgggactgcaggagcacgccacaatgcctggctaattttttttatatttttagtagagatggggtttcaccatattagtcaggctggtcttgaactcctgacctaaggtgatccacccacctcagcctcccaaagtgctgggatagcaggcgtgagccaccatgcccggcctgctgttcacttctacacacacacacacacaccccatttctcccatagcccagttcaactcaagaaagcacttaactcttcataaatagtactcagattggatccaggtagaaaagatgcatattcacaacctggtacagcaaggcactgccctggttctgcatacacttccacttggattcccaagtctgggattctggggacgaaccttcccattaggggcagtgttggatcctgcctgtgtgtttccaaatatgtctttaattttccttgatttatttggactgcagaggacagcagacacagaggagaagaaggaaaggtattgagaacactaagctctggtcagttatgtatgtgtgcacgtgtgtgtgtgtgtgtgtgtgattctatgactatgagtgagactgcatgtttgtgtgtgagtgtgaatgctgtgtgtgtgggtgtgcatgtttgatctgagatctgttctccctgtcagtaggttgttctgggtaacagggcaacaccctgtgcaaattctgggtggcctaaatcttgggccaactgcttgactgactgactgactgactgactgactgactgagggtgggtccttgctggaaacaggtcaggcttctgtagatgccttcccatccccctcctttctcaccaagaaaccattgcccagagtagaaacctgtctgcccaggtgatgcaaacctggtatagaaatgctggggatgcccctgaatcagggaaccagccatgtgcctgggagagactcactccctgccctcctaaatccttttctttgtctctaaaaggccagctatctttcccaaccccacccaaagcctggatgttttggggagaactttaagaacatgccacaggaaggacagagtctgagctaacttgtttctcagtgtggtggggggagggggatggagaaagcaagggcgaggcatgagccagggctgggttccatggatgtgttttgcctcagattctatctttacctcactactgctttttccaaggaaaggaaaccataaatatgtattaagtaccaaccgtatgccaggcactgtgcaaagtgttttgtacacattatctcatttaatattcacaacaaccctatgctgtaggtctcattcttattttagagatggggaaactgagacttagagaactttattaacttgcccagggtgccagagggtctaggtgattagtcttgaagctgtaatttgcatagcacttaagactgagaagatgtccatcaaagaatgatagcgcggatggagattattggaggggctaaatctcccctctagctatctcttgaactaccactgtcagcgtcacaatgaaaatggcaatgctggggattcaaccccaggcgtgaagatgaaactctttctgctagcaagactgcccctcctagagagattactgccaccctaggggaacgtctgagcagcaaactcatcctggtgtttcccaagcaatggtgatgcttggaagtgggatatatcaccaagaacagaagcctgaagcaccccttgtccctgtcccagggagtacctcagctttccaaaatctctcttttaaccccaggcacatttcctcttcccctaaactcttcccactccccgtcctacatttccctcatctggttctaaaagtagaaggggcaggaacagggtgcacaaaccacagactgctatagaggtgactaacagaaacaggcgtctgaactctcttctctacccaaaccctctgaatttggggtctgctgctggtggtgaggagagtggggcaagtaggtcagggccctctgaagtcccatggtgcttcattccaggagctgtattaagaagattggttgagggagcgtgtggaaggccaccaaggaccaacaaaagttgtgtccaaagccttaaggaaacagcatcccacttccccatttacctgcttgagcaacgtgcacctctaaaaccagcccttccgaaagccactgtcctgggccaatgcttcttcagcagatgctttgaagaacctgaagaagggtcccctctctcagaacctaggatctcacccacatcacaggatcctggaggaggcatggattgtccttggcagtggagactaagccccagatgaccctttttctggcatccagtacatgctctgctaaggcctcctgtccaatctttgccatgctgctggagccacagtggtatcatcttccaggcccctgcacctgcccattggctgcccttgagcctctgtagaactcagatgcagggagaatgtgggggaggtggaggaaagggagagggggtgctctgcatctgcttccatctctaccctttatcccaagctccatctcaaaccctctccttatccagtgtctctccatcctttgggcctctgcagatcaccattagctgcctggggaggccagaggctcatgacagtcctcgtgagcagaatggacctcggaggagcggtggcctgggcaggcattaggggccttgtgtagcttctgggaggcttacataaacactggctgggatggggaggaaaggggggttgcaatggctgcccagggaaaaaagcaacccccgcccggccggctcagcctgagtggaaagaaggaacaaggcttactttccctcctctcactcctctcccctggtctgcagctgttagtcgggctggaaagactgcggtatcttgggggagggggggcaggagaaggagagagagaggatgcgacttcacaaatttgggatccctcctcctcttctaaattggggggagggcgagtggggaagaagcagtttgccaaagagattttcaatgccgcaggaaggagctttggctcattagaatgcgcagtttgcaccctggaaaaaaaaaatctgtgctggttgcaaaaatgcagacgtgtgtaggggcccagcggagattaaaaaaaaaaaaaaaaagcgctagctctgcaatgcaggatctgcgaagttttggtgcgatgaggaaatgtgggtcgtgctcatttcatttgcttgttcctgctaacctactgtccccctgactctagcatagtctcatagcccagcaagaggcaccgcagcttagaaatggggtcacgagtagggggcagaagcagagagccagaagtgggggtctgtggttagagtgcccagagaaggaccaatggaggttagagggccaggcagatggaagggggcacttcaatgagggatggaggctgaatttgccttttgcacacgcatttgttctgcagctacacaggggttattgggaaagcccttctaggtttcctccagccctcggctcttccccatctccaagtagcagagggactttccccttccggtccactaacctcacagaccactgttgcagaacctttgcttcatgtccccaaacacacaaatccctgaactgtccttgttctaaccctggagggggcacttgctgcgtgtgtgtgtcatcctccttcctagaaagaggggacagggtagcctgatttggggagcccaggctacagggaagccaagtcttggctctgggcagacatcaacacatcaccatgagggctggggtgggctgttctgtgttcttggcttgggaaggtcctttgttcttttgaggcttagggttctgggttgtgaaaacaccaaggggctgcctgggaggaaaatatgcttggggagaccatgtttcttttctgggtgtttgctcccctggtggctcaggagagacaaaaggagacagaagcaggataaagcgcaaggagacaagaagggagccccgcgcgctttccctccttcctcatcttgcctcctgtttctctggcccacggaggaaggggcccagtgtgtttgtgccggctcgaggctcacgcgggctgccggggtcacatggcccgggcatgtgcagcctgctccatttctaccacaacaactcgctcataaacagcccggctgctgcggcggtggcggtggagacatgtgcaagcgagggggtggggcacgtggccctgcccgagccaagggaaggcgctcgctcagcactgcctccacccctccccagcactggcgctgcctcgtcacaggaaattcctagtgctcctgttgctgctgcaaaacatgttttggggaagtgactttcaataaggatggaatcaatggactatttaaaaagagacagaatggataatcagttagagaccgacttacgcctgcccttaccctctcttaagatctctgtactggttagggtggtaccagttccttcctcctatataaaattggaaccatgtaatcccagcactttgggaggccaacgtgggcggatcatttgaggtcaggagttcgagaccagcctggccaacatggtgaaaccccatctctacaaaaaataaaaaaaaattagccaggcatggtagtgggcgcctgtaatcccagctacctgggaggctgaggcatgagaatcgcttgaacccgggaggcggaggttgtagtgagccgagatcatgcaactgcactccagcctgggcaacagagcgaggccctgtctcaaaaaaaaaaaaaaaatggaaccaatcaagtcctcatggtaaacagtggggggaggggctggggttctctaagacagtggttctcaagataagcatagggatctggggtcacctgggaacatgttagaaatgcaaattcccaggccccatcccaggtggattgaatcagaagctctgggagcaaaacccagcaatctgagttttaacaaggcccttgggattctgggaagcctgagacccactgctttaggtcttcggtccctaacaatcagtcctctaggagaatctagcccaagatctggggacatgtcagctgggcgtggtggctcatccctgtaatcccagcactttgggaggctgaggcaggcggatcacttgaggccacgcattggacaccagcctggtcaacatggtgaaaccccgtctctacaaaaaaatacaaaaattagccgggtgtggtgtgtgcctgtaatcccagctgctcaggaggctgaggcaggagaattccttgaactgggaggtggaggttaccatgagccaagatcacacactgcactccagcctgggcgacagagtgagaccctgtctcaaaaaaaaaaaaaaaaaaaaagatctgggggcatgtctaccttccccctttgtgctgcttcatctcaaagtccagccacagggcgtaatcagatttagtttgactcagagtaaaaagcatttattgagtgcctcctgtgtgcagattctggaaatgcgggcaaatggcacaacagtagtaggctaatgagtagctgagatctcaaagaggagtggaaggtactgggtgaggggagagtgaaagaaagaaaaggttagaattttatttgtttatcctttctccatcttacctacttttcttcctgtcccgaggctcctattagaacaaatgattgtggcttaaattgttttgaggctggaggtagaaattaagcccttatctatttttgctggccatggggaccccaagttagttaacagccataggctcttgacttcccatgagtaactaaaagaagatgaggaccatgcacacaggcacacacaaacactccctgcgatctcagatgctagggtagggagaccaagagaaggaatgaagtcccagaaggttggaagttccctgggtaaaatgagtttagcagataacaagcaggaaaagtctttcaataggggagggcggggtcatccctggcctactccaccttcctgagacccagaaactgtggccagaggaaacaaagggtccctaaggcaaatcacaaaagctcctgagaatgaaacctgagcctggaaagagagtagagaatgagggatggacaccagatccaaagggttcccttacacaggcaaatgggggttagggggttgggagggatgtgagccatgcccagcccctctccttgggccttctctccatcacaggcagttctcaggagcagaactcctgttactgtctcagtctgagcagctgactcctggcctctccctgcttcattttttgaggaataagcttttctctgattctcacagagccctttcttttgcttctctgcaaggctttctctctgtgcctgaaaggctctgggctcaaggagcagacagccctgcaggctcaactgcagtgacctacattggctctcccctaggccctgggtgcgggggctgagatttcaagataggaacctgggaatctggcacaggtctacagatgatgacatcaggcagacaggctgcaaaagtggcattgagggactggaccctgaggcaggggatgccataggactatgttctcactttgtcatttgagggctttttatggacaagagatcagaagagatcaaatgcaaaaacacctgagcagtgaccccttggagaggagccagtggtccctgacaggcccagtctctattaatgagatttgggagtggtttctgcctgctccctgttcttgctgaacctacactggtctgctgcaggggactggaaagatgatgtggaagaatgagttcggatttcagctgatttatttcagggaaacgaaggctgggtaaaagtcagatatgcagaaatccacgtactcccaggcttaactataatatagagaccctgtatttctttagactcaatggttctgagaaggatccagaaggagccctcaagattaattaccatttacaaagtccttacctcaggaccctggcaactgaatccctccttccagctaccagccttctggaacagagaaggcagcttctgaaataggtgctttccctctctcccactataagccacagtgtttaggatgaccactgcttccagattgtgtgatttgccctggcaaggaaatcctattgtggggggaggaaatgaggcagtcgtgacacaaagtgatggatgagccttttgcttagcagagagagagagaaagccggcaggctgtgcagaactgagtggctcttgggtccaaagggcttccccttggccaagtcccaccccaaagcccaggaagtccacagcttggcgcccagtcaaggcaaaaacattcctcaggactctgacaggctgggggatggttcccaccacgaggatgggggaggggaaggaaacacgcgggggaggaaatgaccacaaagaagggggtgagggtaagaggtggggagtgagttctcagtgccctgagtcccttttagagagaaaggttgaggctggactcattggcttgtgaaggacttgcagcttcagagcacatgacttctgggtcacccttctgctcagggtcatccctgatgacccaaggtgtcctctggaggcttgttaactcaatctccctccttacgcaggggctgtggttgagcttgggagcccctgagtggctaaaagctggaattgcagttgtgctgggggaggagcccatcgggtctccctctgcctctccacctccgcccctccctttccctctccctaagcccaggactctggaaatagcacctggtaatgggagcgctgacagatgctgagttataggagagcaaatgtcctggctagagtcctcaacattctagtttgatcgcttttgggctgtttcccttgaaaacacgtgccccagcaaggattgaaaaactacctattggtactatgctcactacctgggtgacaggttcagtcataccccaaacttcaccattacacaatatacccttgtaacaaacctgcatatgtaccccctgaatctaaaataaaagttgaaatacacacacggaaaaataggtgccccaggactacttccattgtcttccataaattactgtttaacatgcccctgggtagtgtgcttcctggctactgagatccccctcctagggctccccggcttgtagcttctggaccattcactgtccatgacccctatgaccttggagggagaaatggccccacaataattctgattttaaatttacccctccctacctgcactacttagtcctagttttcctcctctgagccttgcccacaactccttccccaagtcagcctccaaccttgaatgttccctcacccccagttccctacccaatcccccaatcccacatctcctgtaggggataggagtgaggtgaaaaatggacaaagcttagaaatttttccaaggaaactagttccctctgcatggcttcctttgacctattttctaactttccctggttagcccccttgttccatgtaccaaggcttcccactggactaatttttgctgccccgccctactcctccttcctccaacatgatctcctggggctcttcccatccagggaaaatgttccccagtgctgagagagggagagattccattttggaaactatgtcagcttgaggagtccgagctcttaaagagacaactagagtgttgctggggaagcgggtagtggtagtgagcaaaaagcagctcacccacccagaggaggccctgttcccatcacccagcccataattagggcattcttggctcttgtctggaatgggaggatctgagtgctctgccaacatcatgaagaactcaacgggaaatggagttggagtagaggtaaccaactttgcagctggaaattaaaattttattcaactccacccccaagtaattttatttgatgacatccttctcttgcatttgtctcatcgtttgattgtgtaatccttagccagggagctatgtagatatgaaatcattttaaacagaggcagctgcattcccctattgtacctgagccctcatcagctttcctcctctcaagctgctgccccacattcaccctgaagggggcacttttgttcagtcgttagctggtgccagctgaaagcgagctccaggaaggaaacataacaattggtcacatgttggggtgagggttctcgcaggggctgctgggacagggaagggaggtccacgtggagtgggcggaacgcgctgaaagttttggcggggctagcagagggagaaaaatacccaaatttgagttgtgatttttaatagggggaaaaaaaaaaggcaaggagggtgtgtcctaccctctgagaggcccccgcagaggggagcaggagagcagcacactagcatcctgctcgcggaagcctggaacgcaggacatggtttctgccagaaagagctgagccaggccaggctgcggagctggaagcctctgtggctccacgctggcttcccatcccccatcctcccggagaaggcaaaggtggcctctccaactgtggtgtcctttcagtgtcacaggactggggtaataccagtcacacaactccagtctctatttacctttccgagagcttcaggaaaccacccagatgaatcctctttccctggggagtggccaaaacaagtctcctcttttttctacctacttctgccccactgttagctggaaaacgtagctttatacagtcataaagctgcaagggaccttaaagatgatttatttccattttattttttggtctgggaaaaccaagcccagtcaagtgaaaagtcttgctgcatcctctttccacgacataggcattcccttcaaagaatgtaggtcatagaaatggaattctgccattctataagccttagaggggtggtgaaagtattggcttttaactctttccatactcttagccagaaggcaaaaagaatggtcattatctcattagggacagaattgcttagggaggcccgacactgtggctcaatccggacacggtgactataatcccagcattttgggaggctgaggtgggcggatcacctgaggtcaggagttcgagaccagcccggccaacatggtgaaacccccgtctctactaaaaatacaaaaattagccgggcatggtggcaggcgcctggaatcccagctactcgggaggctgaggcagaaaagaattgcttgaacccaggaggtggaggttgcagtgagccgagattgcaccactgcactgtccaacctgggtgacagagcaaggcttcgtctcaaaaaaaagaaaaaaaaaaaagacttaaggacttgatttatggtcctaaacacagttttcctaggctccctcacagctggcaactccactttgcccctctgggcctttgagagctcccttctttacatttcttagttcagggatcaccacagcttaaaacttaatggtttggaaacaagaattcctttcccttcttagaagaccttctcttctcaggtttcagttttctggtggtttagccaggtcatcctgtgtattgagatcaagatcagacctccaatccaaaaattccagctttggctttggtggggaaaagcatgtttacttagtctggagcagtgaaatcctagactttggatttcagagctgtaaagtttccagaaaaaaaaaatgttgagaccaggcacagtggctcatgcttgtagtcccagcactttgagaggccaaggcggatgggtcacttgagcccaggagtttgagaccagcctgggcaacatggtgaggccccatgtcatgtaaaaattagccaggcatggtggtgcatacctgtagtaccggtgactcaggaggctgaggtaggagtatcacttgagcctgggagttcgaggtatgataatgtctgtgaacagctactggactccagcctgggcaacacagccagaccccgtttaaaaaaaaaagtcaaccaaccccagttgtagagtcccaagcagtggttctcaaacttgaagtacatcagaatcacctggagggcttgttaaaacaccacgtgctgcatctcaccccacagtttcttattcattaggtctaaggtgggaagccaagaatttgcatatctaacaagtttccaggtgatactgaaggtgctggcctggaaccacaattgggctagagaggaagaaaacatataatttattcatggaattgccagctggttagtcttagaaatttgacggtaaagccctccttctccctcaccccactttctattgatcaacaaatgctgccaattagtaataatgtgataactacattatcaagcattactaggtgccacatgctatgataaacattttacatggattatctcatttaatcctcacaataaccctgtgaagtaaggtattagtatagtcattttacagataagcaacctgaggtagaggttaaataacacacagccactaaacgggagaactgtgattgctatttgcagtttcacaccagaaactttgctcttaacagctgagtctcctcctgtcattccctctatatccccatactactagtatcttaaccactcatcatctcacacctgcactaacagccttcaagttggcctccggcttttggtgcagagacgcaaatattgaagttagctttcagatacacaaatctaatcattctatactttggtggaaatcctctgatgtttcaccaaggctgataaattatacattccttaactgggccttcagaccttcataatctggtctcaatctgttttatcccctacatgccccactatccagaactacactccaatgaacttctcccattttctacagttacatcctattttttttttgaaacggagttgcgctcttctcacccagactagagtgcagtggtgagatctcggctcactgcaacctccgccttctgggtttgagtgattctcctgtcttgccttagcctccctattaggagggactacaggcacatgccaccacgcccagctaatttttttttttgagacagagtctgtctcccaggctggagtgcagtggcgcgatctcggctcactgcaagctctgcctcccaggttcatgccattctgcctcagcctcccaagtagctgggactacaggcgtctgccagtacgcccagctattttttttaatttttagtagagacggggtttcaccgtcttagccaggatggtcttgatctcctgacctcgtgatctgcccgcctcggcctcccaaagtgctgggattacaggtgtgagccactgtgcccagctgcaatgttcttacctctgcctgaaatgtcctttgatctcaaccttcaaggcccacctcagttgtcacttcctccttaattccttccagatggtatgttcaaatttgttcctagacaaatttactcttctctaggtttcactattttattagagacagagtcttgctctatcaaccaggctggagttcagcagtgtgatcatagctcactataacctcagcctctcgggctcaaacaatcctcccgccttagcctcccaagtagctaggactacaggcatgcaccacaatgctcggctaatttttttttttttttttgagacagagcctcactctgctacccaggctggagtgcagtgacttgatcttggctcactgcaacctctgcctcccaggttcaagcgattctcctgtctcagcatcctgtgtagccgagattacaggtgtgcgccaccacatctggctaatttttgtttgtttgtttgtttgagatgggagtcttgctgtgtcgcccaggctggagtgcgatggcacgatctcgactcactgcaacctccgcctctcaggttcaagcgattctcctgcctcagcctcccgagtagctgggattacaggcatccaccaccatgcccagctaatttttgcatttttagtagagacggggtttcatcacgttggccaggctggtctcaaactcctgacctcaggtgatccgcctgcctcggcctcctaaagtgctgggattacaggcatgagccaccgcacccgaccaaacgttatgaccacaaagggactcaaaccctcaatcttctgatctgaagtcagacaccttatccattaaggccacacggtctcctactctaatttttggatttttagtagagactgggggtttcaccatgttggccaggctggtctcaaactcctcacctcaagcgatctgcctgcctcggcctcccaaagtgctaggattacaggtgtgagccaccagacccagccataatttttaaattttttgtagagacagggtctcactatgttgcccaggcttgtcccaaacgcctggcttcaggtgatcctcatgccttggcctcccaaagtgttgagattacaggcgtgagccaccacacccggccctattttttaatagaactgccaccctcagtcaagctaaaggtcaaaggtaggtagatgctttctcttaatatatctaaacagctcatttaatcatttaaccaatatttattaaatgcctactttgtggcaggtatggttctaggtgctgaggatatggcagtaacaaaacatgaagcagcccagtgctgtggctcacacttttaatcccagcactttgggaggctgaggcaggtggatctctcgaggtcaagagtttgataccagcctggtcaacatggcgaaaccctgtctctactaaaaacacaaaaattagccaggcgtggtggtgcacgcctgtaatcccagctacttgggcagccgaggcagaacagtcacttgaacctgggaggcagaggttgcggtgagccgagattacaccactgcactccagcctgggtaagagtgagactccgtcttaaaaaacaaacaaaccccccaaaactatgaagtttacattgtagtgggggaggataaggtaataaggtaaattagaggtaatacatgctaaggagaaaaatcaagcaaaaaaagggaagaggcggtttggagaaggctgtgagtatacatagcgggggccaaaggtctcagctgacatacagtaaagagctgaaggaggtgagggaggaagtcatgtggacatctgaaggaagagggatctaggtagagggaacagcaactgcaagggcctgaaggggccaacagaaaggagtgaataacagtagaaactaaagtcagagagcagtaccagggagccagatcctacaagccttaatgattttacttttactccaagtgagatgggaagccatgagagggttctgagtagagaaagatcatgatcttactcccatcttaccaggaccactgtggctgctgagtagacttaagtgatggaaggcaaaggttgaaactgagagaccaattacagttactgcaattaaaacaagtgagataggattgtgtggcagaggccagggtggaagttgtggaggtgttgagaaactgtgggattttggacatacatatacatatatatatatatatatatatatatatatatatatgtatttttttttttttttgagatggagtctccctctgtcactcaggctggagtgcagtggtgggatctcggctgactgcaagctctgcctcccgggttcaccccattctcctgcctcagcctcccgagtagctgggactacaggcccctgccaccaggctcggctaaatttttttttttttttgagacggactctcactctgtcgccaggctggagtgcagtggcgcgatctcggctcactgcaagctctgcctcctgggttcacgccattctcctgcctcagcctcccgagtagctgggactacaagcgcccgccaccatgcttggctaattttttgtatttttagtagagacggggtttcgccatgttagccaggatggtctcgatctcctgaccttgtgatccgcccacctcggcctcccagagtgctggggtaacaggcacgagccacgacgtccagccttggacatacattttgaaaggcaatggggtgacaaagagaggaagactgggctgggcgcggtggcttacgcctgtaatcccagctttgggtggctgaggtgagcggatcatgaggtcaggagtttgagaccagcctgaccaacatggtgaaaccccgtctctactaaaaatacaaaaattagctgggcatggtggtgcatgcctgtaatcccagctactctggaggctgaggcaggagaatcgcttgaacccgggaggtggagaggttgcagtgggctgagattgtgccactgcactccagcctgggcaacagagcaagactccgtctcaaaaaaaaaaaaaaaaaagagtaagactgtagaagtggtatttgggtgtttgggtgggaggaattcgggagcttgatttttagatgtaagtttgaaatacctaggccgggcgcggtggttcacacctgtaatcccagcactctgggaggccgaggcgggcagatcacgaggtcaggagatgagaccatcctgactaacacagtgaaaccacgtctctactaaaaaatacaaaaaattagccaggcgtagtggcaggcgcctgtagtcccagctactggggaggctgaggcagaatggcgtgaacccgggaggagctcgcagtgagccgagatcgtgccactgcactccagcactccagcctgggcaacagagcaagactccacctcaaaaaaaagaaatacctattagacatccaactgggtatgtatactagacagttggatatatgattctggagttaggggatgagtccagaaagaaatataaattacggagctgtcagcgtagagatggtgcagaaagtcttgacgctgaaggctgggcacagtggctcactcctataatcccagcactttgggacgcccaggtgggaggatcgcttgagcgagttcaataccagcctgggcaacaaaggctggtattacaaaggcccgtctctacaaaaaaataaaaagttagccaggtgtggcagcccaagcctgttgtcccagctacttaggagactgaggtgggaggatcacttgagccctggaggttgaggctgcagtgaaccataattgtgccactgtactctagccttggggacacagcaagaccccagtgccacaaacacacaagccttgacatggaaagagatcaccacattctatgtgccctctcatccctgctcactccattacttggtgtccctaagctcaatacttcccttgctgatctgaggccatacagtctggtgaaagagggccggactcttggcttcttaacacattcacatacgtttgtttaaaatttccagtgtttcatgctttcagcccacaaagcacagacacagttttaatgagaggttttcacatcaggccagagaatgtcagtcttctccatctccatagagattttaaaaagcacacctcagacaaaaaagaaaaacaagcaattaagactatttcagggctgggcacggtggctcacacctgtaatcccaccactttgggaggccgaggcgggcggatcacctgaagtcgggagttccagaccagcctgaccaaggagaaatcctgtctctactaaaaatacaaaattagctgggcgtggtggcgcgtgactgtaatcccagctactcgggaggctgaggcaggagaatcgcttgaaccccggaggcggaggttgcagtgagctgaatttcaccattgcactccagcctgggcgacagagtgagaatccgtctcaaaaaaaaaaaacgtttttttcacaaggaattctgaggacttgttggctcaattgcttggacataaagacacacatacatgaagctggagagataggaagaagcgctcaacacagaacaccctaagtatccctactccctttcaaggactaaatcccttcagagatttcctttgcttcagtccttcaggagcctcccgaagatgctaggagtcgtttaagaaggctggaagatggccgttgggaaggaactgttggtagctggcaatacttcatcccaaggaggcggtggcaatagctccctgggcagcagacatcatggattttcctccctctgggaaccagaggtccctccgtttctggtttgaatcccttagagacaaagaacttcattctctcccatacccgcgtgggactgctggggaggagagggggtggaggggttagacttctacccccatgaaacacccgcgggctcaaagaggagcctggatcctgactggtccaggaggcgtgcggggccgcggggcccctccggcttgggccaggcgcgttgccaagatgcccggggaaggggccgcccggcgcaggccggggacgtggagcgctcggggcgctcccacgtaggccacacattggccgcctgtatcctccttctttcctctcaactccattctctcgcgcttttttcccggggagcctccgctttccccttcttcccgcggccgccctcgcccttcttccccctccagaccctcccccggctcgcccctccctcggcagcccaccttcaccccgctcctccgcgcgctcctcggtcctcgcccctcagccccggcctcccctcgccggcccccggcccccgcggtcccctccctgcccccctcgaggcggcggcggcccctttcacaatagcgcggcccgcctccctcctctcggctcccggtgcactcccgcccgctcccctccccgcgcatgcgtcctccggttggcggcggctgcggcggtggcggctacgagcggctccgtttttttaaagggaaacgctgaggcgccgggggtgactgtgggggagggggaccccgagccgcggagacccccgggagaggcgacagaccccctctcccggagtaggagggctttgggcggacccagccctccaccccctcctgaggaggaggggggggaaatggaggctcggggcggttgaggcgagctccggggcggggggccggggcggggaagggggggtgcggggtggggagacgaggcgggcccggccgggccagggggggccgaagcgagctccggggatgagctcgggggcggctgggtgcgagctcctgcctctgaggcgaaggcggcggcggcggcagcagaggcggcggcgaggcccccatgggccggcggcgggcctcagccgcggcctccacgtctccgcacgccggcgggatggcgcccgggccccggaggagccgcgctagcggaggcctgctgccgcgctgctgaggcgagcccgccaaactcccctcccccccctcagtcctcgaccccccgcacctcgccccttccccaccccctcctccgcctcggtgcccggcgctgctccggaccactatgaccatgagatccgcggtgttcaaggcggccgcggcccctgccggcggcaatcctgagcagcgactggactacgagcgggctgcggcgctgggcgggcccgaggacgagcctggggcggccgaagcccacttcctcccccggcaccgtaagctcaaggagccggggcccccgctggcctcctcccagggcgggagccccgcgccttccccggccggctgcggcggcaagggccggggcttgttactcccggccggggcggcccccgggcagcaggaagagagctggggcggttcggtgcccttgccctgtccgcccccggccaccaagcaagccggcattgggggggagcctgccgcagccggagccggctgcagcccccggcccaagtatcaggcggtgctgcccattcagacgggctctctcgtggcggcggccaaagagcctacgccctgggctggggacaagggtggggcggcctcccccgctgccaccgcctcggacccggcgggacccccaccactacctctgcccgggccgccacccctcgcgcccaccgccaccgccgggaccctggcggccagcgagggcagatggaagagtatgaggaagagccctctcgggggtggtggcggctcgggagcctccagtcaggccgcctgcctcaaacagatccttctgctgcaattggacctcatcgaacagcagcagcagcagctgcaggccaaggaaaaggagatcgaggagctgaagtcagagagagacacggtacgggaggggttaatctgcattcgggccgaggagcgagttgtgcgcatgctcgggggaagggggctgtaggaggttaaggcacccccgggttaggggtaaaggaggttggccaccggcaaaggagtatcttaggcgctgggtctctgggagccaggctcacagacacgttgggttggagggaagggttaaagggcaacctctcagggggagggggaggggtttcaggtgccaaagggttaatttaaaatgacagccccagacgtgtgggaaagacgtttagtggaaaaagacgtgatctgtgaggggttaaaaatgaaagggtggggtgtaggtgttgtgtccttatggaagggttaaattaaagagctattgcgttagaaatgcacggtggaggagagggctgtagcaagcagctgttgctttcaccactgctgcagcatctttagataggagggcagtaggccttttagtgggcacaggggtagaggtgatttacgtggaatcctattttagttttcttaaatgatattaagagaatcactgcctttgatttcagacagcttttaataggaacctgagttctaatacatgacccactgaccaggtcccttttataagcatggtgtttgaaactggaagattttagggcatcaggggaaagtaagcttattaaatgtattaaatagacctccccatccttattttagaatcttagggagtaggaaagtcgtttattatttctttacttctgaggagcttggacgacacaggcttgtttttactgcagcagtagttaagggcatctctgcgttaaaacatattccttcagatatgagggaagctggggtggggggtattactgtgctagcataccttacagctgcctaaaaataaacatggtttctacaattgttgtgttcaggctgcagcagtctctctctccctctctccctccctcttcctccctccctgtctctttccctttctctctctctctctctccctccctccccgccgtcctcatctctccctctctcctctttctctctggcgtcgtgtgcgctaagagctgagcaagggagcaagcggctattcattttgtttgctttccaaatgaatctcatcgggtggctgttttattggagaatgcattctgcaaggtggattgggagctggggcaggtctcattaaaatatctcatggtgttgatttgtggaagttactcaacatggaggtggcactgctcagactgtactgcagtctaggggtgtgatggtaccgtaattacaacacatcatatccttgtatggggggagtgggaagagaaggaccagtgaaggagaaaaaaatcaaggaaatgtcacccacaaatggtggttaagggctgtgaatcaaaacatatacaaggagatgaaatgagagtatggctgataggggggttctctgctgattgtggaggtttctgctcagttcctgaggtaatggcccctttgcaggctttcctagtcaggaaaagtggggtgagttaaggatagagtgtcagtctgaacttggtactcactgcttctgttgtgtattgcaatcttaatattgcttaagcttgtttcacttattccagttgttgtttggccttgtctgaaatctatgcaatgaatgtaatgaaggcagcgttaaacatcactgtctaacccagataaaattcttgtaatagagtataagtagcacaacaccttttctcaaaactaaactaacacaaagttttcaatactaatagagttccattttctgtttagttttttagtccttccttttaactaaaactaaaggaactttgattttaataaatatttagatgaataggtataattttttgtgttacctcaaattcaaaggaatgtgtttatgtcatgattgttggaattatgggtactgatttctattttccaaatgaaatgttcattgttttaaaagtaccccctcccacacatacccctttcaaataacactgccattcctggtggcactgtatgagctcttaattccttctcaatgtactgtttgcactttgctgttgtgtatagagctttggagtagaagtagagaggatagaatttggacaatctcagggcctcttaaaagatcatgtaggctgggcgcggtggctcacgcctgtaatcccagcactttgggaggcctacgcaggtggaccacgaggtcaagagatagagaccatcctggccaacatggtgaaaccctgtctctactaaaaatacaaaaattacccggtgtggtggcgggcgcctgaaataccagctactcgggaggctgaggcagggaggcggaggttgcagtgagccattgcaatccagcctgggcaacaagagcaaaactccgtctcaaaacaaaaacaaaaacaaacaaacaaaacatgtatacaattaattctggaaactcccgaaccaacttggagccacacaggtagcagtagcagagaccatgccattaaaaggcatgttacggcccttcccagtggagaggatctccctacagaagaatgaactacaaattaccccatgcctcttcccatctaggttagcccttaaaatttaacagtataccttctcttctctattttgtttaaggaaaactgttcagattaatgtctgcctatttaaaaagttgagttgatgtggtccatagaaagaggcagaagactatactgattcctaaatggggctaagtatctgtgtgtttaattttttatgtgttaagtctgcattttgctactctctcttttagctccttgctcggattgaacgtatggaaaggcggatgcagctggtaaagaaggataacgagaaagaaaggcacaagctgtttcagggctatgaaactgaagagagagaggaaacagagctatctgagaaaattaaactggagtgccagccggagctttccgagacatcccagactctgcctcccaagcccttctcatgtgggcggagtggaaagggacataaaaggtgtgctgataactttgtttgatgaggacccttgttaccagtgattgagagtaggagattgggatttatgaattggttttatagcaatcataacttgctttagaagtcttctatgcggagggccgggtgtggtggctcacacctgtaatcccagcactttgggaggccaaggcgggtggatcatgaggtcaagagatagagaccatcctggccaacattttgaaaccccgtctctactaaaaatataaaaaattagccgggcgtgatggcgggcgcctgtagtcccagctactcgggaggctgaggcaggagaatcacttgaacccgggaggcggaggttgcagtgagccgggattgctccactgcactccagcctggcaacagagcgagactccgtcaaaaaaaaaaaaaaaagaagtcttctatgctgagaaactatcttgaaacattcttatgcagactgtaaaagtctgtttaggagtattttggtcacagtaataattattgaatgcagcttacatcataaagagaatgggcaataagtatgacagctgagtttcttaaaactatagcagttcacttcaagttaggaagtgttaaattccttcattgtgtcgtgcattggtagacatagaaaagtaaaatacaggccaggcgtggtggctcatgcctgtaatccctttgagagggcaaggtggggaaggagtatggaacgtatggaaagtggggaaggagggatcgcttgcgcccaggagtttgagaccagcctgggcaacatagtgagacctcatttttacaaaaaatccaaaaattagccgggcctggaggtatgcacctgtagtcccagctactcaggaggttgaggctacagtgagctgttactgcaccactgcactccagcctgggtgacggagtgataccctgtctcaattgaaaaaaaaaaaaaaaaaggtaaaaatggaactgtccttggactcaaagaaattagcccaactgtaaggataggcatacattttgaaaactcagaattcaaatgcagtaaaatacgtagatgtacaacacctgatataaactaaggctttttgtttgtttgagatagggtctctctctgtcacccaggctggggtgcaagtgtcgccaacatggctcacttcatcttccacctcttggactcaagtgatcctcctacttcagcctcccatgtagctaggaccataggcactcaccatgcttggctaactttttttagtttttgtagagacaggctctcactttgtttcccaggctgatctcaaactcctgggctcaagtgatcctcccgaagtgctgggattacagacattaaactaagttttgtaagattcagggatattaaaagttattctgggttagaattgtgaaactttaagtagaaatcagtcttgaaaaagaagtatagccgggtgcggtggctcacgcctgtaatcccagcactttgggaggccgaggcgggtggatcacgaggtcaggagatcgagaccatcctggctaacacggtgaaaccctgtctctactaaaaatagaaaaattagccgggtgtggtgcatacacctgtagtcccagctacttgggaggctgaggcaggagaattgcttgaacccaggaggtggaggttgcagtaagcagagatcgcaccactgcactccactctgggtgacagagtgagactccaaaaaagtattaaaatttaggttggtaaagaggaagggagatgactttcttgggatgtggtgggggaagaagggaagaagaaagaggctagagaatgccagcagacagtaagaaaaaggaaataaaggttacaattaatgtggtacagggttgggggaaaaggaaagagactgatctctggattacaagaagtaggtgcacctaatgtgggttgtagtggtacataatgttggctaaaggaccttgaatattctttttttttttttttttttttctgagacagagtctcactctgtcgcccaggctggagtgcagtggcgtgatctcagctcactgcaacctctgcctcccagggtcaagcgattctcctgcctcagcctctcaagtagctaggattacaggcatgtgccaccacgcctgactaatttttgtattttttttttttagtagagacggggtttcaccatattgaccaggctggtctcgaactcctgacctcaagtgatccgcctgcattggccttccaaagtgctgggattacaggcgtgagccactgcgcctggtggaccttgaatattcttaagcatggaaattccttgttcaacatttactggccaggtgcagtggctcatgccggtaatcccagcactttgggaggcctaggtgggtggatcacctgaggtcaggtatttgagaccagtctgaccaatatggtgaaaccctgcctttattaaaaatacaaaaaaaattaaccaggcatggtggtgtatgcctgtaatcccagctactcaggaggctgagataggagaattgcttgaacccgggaggcagagattgcagtgagccgagatcatgccactgcactccagcttgggtgacagagcaagactctgtctcaaaaacaaaacaaaacaaaacaaaaaatttactatgggcctattttatatactgctaagcctgggctgttcctgctcatgactgctaaatgagcaccagacatttaggtacctgaatacttgtcattttggggcaaaagaaccagcttattcttttgctccagaatgtgttcaaattagattttattcaagtgtcaataaattttataatgttttcttccctatctaataggaaatccccatttggaagtacagaaagaaagactcctgttaaaaagctggctcctgaattttcaaaagtcaaaacaaaaactcctaagcactctcctattaaagaggaaccctgtggttccttatctgaaactgtttgtaaacgtgaattgaggagccaagaaaccccagaaaagccccggtcttcagtggacaccccaccaagactctccactccccaaaagggacccagcacccatcccaaggagaaagccttctcaagtgagatagaagatttgccgtacctttccaccacagaaatgtatttgtgtcgttggcaccagcctcccccatcaccgttaccattacgggaatcctctccaaagaaggaggagactgtagcaagtaaggcatagagaacacttgctcttataccctagtggtggcggtcaagctaacaagtgtgaaaatgcctttggcatttttaaaaaagtgcaatcaataaagcagagttctgtcaagaatgagtaagttaacagccagagacagacactgtgcaggcattgcaaatagatggaattacagcaaaatgtgctcaatgtatttgcctgcttacaacactgggagatgtgtttgccagtaagttgctcatcacaagagcaccagacttgggggtgtaatctccggcaacttgcatgccctctgaaagaagggttttctgtgctgtgaaatgcatagaactatactttgccatgcacgactgttcctgcaattgatattgtgtgaaatctgggagggtggtctttgggtgttctcaggggccaatggtaatttttgggttggggagccagcttggggtggggaattttcacctgggcctccgctctttaactatataaacatttatctgtatatctatgtccctgtctggggggcaggaggaatctgccaaagaccaacagtcttactttatcttactatacttcacaaaggttctaaaatgtgaagagtttacttggattgcagtagcccattggttgttcatatatttaaataaaatggtctacaaactatttttcaaacaataaggactatcttgggatatctgagctgcttggggagggtgtggggtgtgggaccttggtcttcattcccttttttttttctttatggcttccacacagagatgctcccctatcttctacatcaaccagtaactggaatgtgccttcaatcatgtaatattagtctatgtcagtcactgcggttactctggggtaatggttggggaggccttctaggatagagccgcagtcccaagtttctaccactgtgtcttgcctagcaggatggggatagaaatccattccagtgagacaagagcgttctccaggctttgtttggctgttctggtgacaaaattaagtgggaaagctagattagtcgtcttaatgatctaacctctattaggcctcacacttgagtacatgagatagatcaggatcctgatctaggttcagatttttgttggttcagtcagttgaacaggttcttccttaatggttaacctcttttgctgccatggcaatgctgcgtaacaacttaagagaaacgtgaagcaacttcccatccgggattgggtaatggcttggtccagagctgttctgtgtgactggctatttttgaaaatcctttcttccctagtacagacaatttcaaacacctctgagattgtgggcatagtgaaacaaaggagtctaattggggagatcccagccccttgaggagcctgagttgtgaataaacatgtgaatccttattcttgatgcccctatctcaagaggaaggctcaatggcttgttctaggggagccaaagtctttgtgcatgttgttcaggctggaccagcaaggtagtttgtttggagggaggagggagctgtttaagaagactacatatgtaagttttgagaacactgatcttttatttgaaaaatagggtcaacttttactcacctgccatgttctgagtttaaggtttgatatccttggccatcaactgttgcagggaaaccaccctaaataatgaagaaaagaagtcgtctcagtgtaaaaaaaaaaagtggtgggcttattttcttttcttttgtctgttgttccctcttcccctcccccagagagaaattctcaaaagaacaactcaaaaaacaaaatggcttcctagtgagaacttcagtgatgatcctttcctccatttggggtatgggctttttttctttttacactgagattattcttctttcctgcattatttagggtgtctgatgccatcaagtgttgcaggagaaacttcagtcttggctggtgagtagaataggaattgtgctggctgggcctggggtgggggttggtgggatggtggatggttgggagctgcattccccatccactggatgtgggagactgagatttcttggtgtatgattgattacactactatagacttcaaaatgacaacaaatttcagttgtttttcaggaactgctatagcatcattatatgaattgtcaggtattggtttagggtttttgtgatcctgagtttggcagactgcaatggcattttaggttcttttataccatagcaaggacactgaatatggcttcagggaggccatagaatggattcctatcacttggtaactttgtctcttctggggagagacctcttatcctagtgaatagttgtgcaactttggatttaagggtggttccacccctcctccctttctttttctctctcttttttttcagttccttcttggagggaccactcagtagagcctctaagggacccaaatccttcagaccttttggaggtaggtaaccaagagcactcaattgaagagagtaagagattaaatagaatgtgagggtataactggaaaatgtcatagtactatggatgaattaaataattttaaggccagacagaaacttgagaaattatctagtccagctccttcattttatagattaaaaaacaggtctagagtagttaagtgatttattaaaaaataaatagctaggtaatgttcaaaacaaaggtagattttatgctaagtagaaaagttagggctgggtgtggtggcttacgcctataatcccagcactttgggaggctgagacaggtggatcacctgaggtcaggagtcagagatcagcctggccaatgtggtgaaaccccatctccactaaaaatacaaaaattagccgggcgtggtggcgcacacctgtaatcccagctactcgggaggctgagacagggagaattgcttgaacccaggaggcagaggttgcagtgagccaagatcgcaccactgcactccagcctgggtgacggagtgactccatcacacacacacaaaaaaaagcatgtacccctcaaccataaaattacatattccaagctcatttgactcttaaagttttgattattttaaagtcagactcttacaaagtatggaggcagggagggtttatgacagtctgggggttttagtttgatgtgatgtttaccttggaaagatatggaaatgattttgaaatttggagattctaaaaggatgtggatggggaaaggagtatgtgttttgttgattctgttaccaggaggttcccatactgtccatggaacccacagactcaggtagaaccggaaggtgaaagattttacgttcctggaagctggaaattagttagtatatgtgtgtaactaatatatggtgataaatagcttatcagctgcttttctttacacagaacctggatgacagtgtgttttcgaagcggcatgcaaaactggagctggatgagaagagaaggaaaaggtgaggccagagatgtccatcctggaaacaactgagccctaggacctaggacagagtatcagggaacctgacctccctttttcatgctgtggagaatcttggagtgcttaacactcttacattactggcttcccagttggttgaatatcttagttggaaatggtagttgttgcggtaaacatgtttggcctctttttgtgtatgaccttcctcaattctactttctgtggaacaccaacacatgatctaaacggtagacctaaacagctctcccttaacaaggcagtcatttctctttaccctgtctagaggagtcagcaagggtcttcctagcatctggattgtgtgagttgcttttatagagcaggttttgggtaaacagtaatgttgggtttctttgttttgtttggtttgtttttcccagatgggatattcagaggatcagggaacaaagaattttacagcgactgcagctcagaatgtataaaaagaaaggaattcaggaatctgagcctgaggttacctcatttttccctgagccagatgatggtaagttgtgtccatctaaaagagtaggtttttgaaagaaggaggagggtgcaaggctccagggtacaacttgctctgaatgaatgaagtgtattttggagcagatatagcttctagacatttcccatctgtattactaatacgctcccgtttgactttctcccatagttgaaagtttgatgattacccccttcttgcctgttgtagcatttggacgaccattaccaaaattaactccacagtaagtatacattttttttctccccttccaggtaacctgcacatccttttcagacttcatggaagcctagatatgaggtggaaccaggtggcttagggatagccatgggtctttgacagaaatgaggctacctgggcaactagcttttgtaataagattcccaagccaataattaggagtattgctttttgagttagaaatagatgattccatcactttaatggtacacagttgctctggctttgaggcaggaaagacactccaaactagtcagggataggagtggtaagggacatagtgacttttttgtagttgctatcatgtccacactgaatcccttctagtcttgcaagttgatttcctcatccttttttgccaggaattttgagctaccctggttggatgagcgtagccgatgcagattggagatccagaagaagcaaacacctcaccggacgtgtaggaaatagctgtgctggcaagaaccctgtcttcagatagttgtagcatgccattcccgagagtggcagagacctgtatatgtgacctttgtcctcacatatgttatcactcgctgataataccctttcatacttccttgactttgttttcattactctgatttcacaaaaactctttcattcggctaattgtgagttatggagggtgattgggatttcttttcccttttttgggaaatgggctctcaagctaaagctataggatggcagattcagaagtttcaggggtctgtttctatacatttgcctatgttaaaggggtaaaagggctctcttcattagacatgtggaagatgaagcagccccttcctttagagctgtgcctgcatggcactcttctcaccctggtacaccctccttatagtgggtatagtgatttttaaccctaaaataaaacaaacaacctcaccatgagctttaggaccagaagaggaatgacaagtgaagcgatgaagcaagccatcttcacagagtagaaaagacatcggagagttggtagataactgtctgaaaagatagttgttcatttgaaactattctgtgatacagtcatgtgggaagggatgtttggctgtgattattttttcagttaatggataacaatttctttactgctcaaaaaccaaaatctttggaaaagaaagtggggatggttagtttcagaacaagttacagctgtaaacaaaagcacttagtatttgggatggcatgccaaaacctgtataaatgtccttgtatcacatcacttctcaagtattccttcattgggcttcatccttttagcagaactcttggtggtgggatagagacttagggagggtagggggagagtgtggaaataggtgcttcctttggctggcaaatgtctacatcttgaaacaaacagatgtacctaatgagcttctccattcactttgtaaaaataatttgtatgtgtaccatcttggtcctctcccctcccgttttgttaaaatatcaggatagcactcccaggccactttggtctcagtgtaagatccctattaactatctgaaaggaaaatagagccaagacctctggtctcaaatatataggaattgcctttctttagtcttcaggactattgtgtgaaaacaagtaggggtctaatctcctagaaggtaggggcttttatccttaaagagaatatgtccccagattattagcacttttagaggagaagccaaggtatgtagggtgtgtggctggcccatcagtggagcacgaagagagaatgggataccattgtgggaagagaagaaaagttcctcaggggcctcccactgctaaagttttttgtgagatgttgatctgtgcttcctggatttgacttttaaaggaattattctggcagcacatgtagtattcttggatgatcttgctgctcttatttctccttttgtgtgtgtgtgtgtgtgtgtgtggctatgggttttcatttgtaactccatctgcttaggagagtgggctctctataagggaacctgctgtaaacttcattgcagcaaggatgtagagagaaataggacttaattccactaggggctctcatctcacaccttaaggaggagatttctagaaaaactgggccagattttctttgttctccatcattttaatgtggcaggctgttcagttttcttactcttacctatgtgatatttcttcgtaacgtgtccaaaaagaaaaaagacccaatcagtgtctcttgactttgttctttgatccctcagtttcttcttgatttcagcatgtgtcgggttcctaattttgggtatgagttagcaaatttaaccattgtgtttgtgccctacccaggggactccccagtttctgacttgaagtagactgagaagaatccacgaggtgctatctggccagatttaagtagattctatttccttggttctccctctccctgaggacctcttattttattgtcccctcttctaggttaattctcctttgatttgactttgttgagaaggaggttggacagtagattagcaaagttccaagtgcaaaattacagtgtgttagagtgtggggggaaaattagtcttatttttccctacatgggatacaacactgtgaattcaatcttcaactgaaggccctgcagttctcctaaaacatagttgtttgtttttctttaacaaagtttaagctagtgttaataaattaaaaaaaattgcttgtctgtctacttcagctttgttttatgcccatttcatattgttgtctgtgttgtaattcataacttttgataccatttctgatgtgtaaaattggttgtcttgtaaatatcttataaagagttcaattgtaaataaactattgtggctgttaatttttgaacttctgcttcaatttattatatttattggcaaacaaacaattctgcttgtatatttgaaacattggaaaaagaaatccattttctcaataaaaaagaataacacattattttcccctttataataaggtactcacttccatttgtgtataagtataatgtatgtttcatccctctttgtccagtgtacttccttaagtataatcagcaacttggctgggcgcagtggctcacacctgtgatcccagcactttggtggctgaggtgggcagatcacttgtggtcagaggttcaagaccagcctggccaacacagtaaaacatggtaaaaccccatctactaaaaatacaaaaattatccagatgtggtggcatgcacctgttatcccagttacttgggaggctgaggcaggaaaatctcttgaacctgggaagtggaagttgtggtaagccaagatcaagctgctgcacttcagcctgggtgacagcgagactccatcccacccacccccaacaaaaaaaaagggtcgggcgtgttggctcacatttgtaatcccagccactttgggagactgaggtgggtagatcacctgaggtcagaagttcgaaaccagcttggccaacacggtgaaaccctgtctctactaaaaataaaataaattagccaggcttggtgacaggcacctgtaatcccagctactcgggaggctgaggcaggagaattgcttgaacccaggaggcagaggttgcagtgagccgagatcatgccattgcactccagcctgggtgatagagggagactccaactccaaaaaaaaaaaagtataattagcaattttagaaacgagattataggatacttcgtaagttaacaaaatcttatagctggaaagacattagaggtcatctagtgtgaccccgatatgtgatttacccttgataacactccagacaagcaaattccaggctgtgcttcaacactttttctacatacatttttccccctaagtgtttgaaaattcttgcttgttgacaaaaaatctaacttcttgtaacttaaactcactggtttttgctttgccttctaggatgatgaaaaaaagaccaatccctcctttcttcatagtccctagttaaagattgctgtgggctccaggcccggcgcggtggctcaggcctgtaatcccagcactttgggaggccaaggcgggtggatcacgaggtcaggagttcaagagcagcctgaccaacatggtgaaaccccgtctctactaaaaatacaaaaattagctgggcgtggtggtgcgcgcctgtaatcccagctacacaggaggctgaggcaggagaatcgcttgaacctgaaaggcggaggttgcagtgagcccagatcgcaccactccactccagcctgggcgacagagcgagactccgtccccctcaaaaaaaaaaaaaaaaactggacccagactaaacaactgaaggacaaagtggcagactatcactttccttatttagacactaaacttggcagccttatttgcaccaatttagtctgtgatcgataagatcctccaggttctttttctttaacacttattaaatcatattatcctccattttgaactcaggcagttggcttttggagctggacttataagttgtcacgtttggccacttgtctaattagctgagattgtttgaattttctttttttcttttttttgaaacagaatctctttgtctcccaggctggagtgcagtggcgcgatctcggctcactgcaagctccgcctaccgggttcacgccattctgcctcagcctcccgaatagctgggactacaggcgcctgccaccacgcccgtctatttttttttatttttagtagagacggggtttcaccgtgttagccaggatggtcttgatctcctgacctcgtgatctgcccgcctcggcctcccaaagtgctaggattacaggcgtgagccaccgcgcccggccttgaattttcctttcatctctgaaggcattcataattacttccagtttcatgttatctataaatttgataaacatcaggatccttaaccatgtcatttataaaaattttactcaggaaaggccgggcgcggtggctcacgcctgtaatcccagcactttgggaggccaagaacggcggatcacgaggtcaggagatcgagaccatcctggctaacacggtgaaacctcatctctactaaaaacataaaaagttagtcgggcctggcggcagacacctgtagtcccagctactcgggaggctgaggcaggagaatggcgtgaacccgggagacggagctttcagtgggccgagatcaccccactgcaccccagcctgggcgacagacagagtgagactccctctcaaaaaaaaaaaaaatattttactcagggaagaattctatgccatggtggcctttgtttgataacatacattattaacgtgcactcctgtaggtgcactaaaaacttagctcatgcactttgtatatccttataatggtccaaagaaaacacactgattcttttcaatggtggccaatgccttgccaaaatgaaataatttccataaaccttaagaaggaaataatgtcaggattttgaatcaacatctgtttctactgaccatttatttttaaataggttctaaaatcctgacaagggcagtagctcatgcctgtagtcccagcactttgggaggctgagacgaaaggatcgcttgatcccagccaggagacaagcctgggcaagagcgagaccccatctctacaaaaaacagaaaaattagccgggtgtggtagtgtgtgcccgttgtcccaactactaaggaagctaaggcaaggaggtcacctgtgcctgggaggtcaaggctgcagtgagccgcgctactgcactccagcctgggcaacagagtgagaccctgcctcgaaaaagccaaaacaaaaccggtaatactggcatcataccagcctgcactttgggacaggtgatggctggggtgggaagaaacgtgaagaggaaatgagaacacagagaaaacgctgcaacaagaagtcctctggcttcactgcagacaactggtttctccttcgcccgttatcttaaacaaggctggtgcagcaaatctgacgcagcactacagcttttaagatttaccttgattcgtgattttaccaagcaaaggaatgcagtaaattgacctgcttcaaacgtaggtagaagtgagaaatggaaacagaaaaccatgaaacagccctagtgttgcagtgaagctgtgacaggttgactccttccactcgggaagcccaagatggccgggccaggaacccgggaggctgctgaagtctcaattcccctcgccctaggcctgcccaagggaagtcaggagccgcgccacgcccccttacatcaccgatagacgtaatccgggtcggccgcaaacgtgccgcaggcctaggccccgcccagtgccccgcccctcccccaacacacacacacacacacacacacacacacaccccaacacacacacacacaccccaacacacacacacacacacacacacacacacacacacacacacacacacacacacacagcgggatggccgagcgccgcacgcgtagcacgccgggactagctatccagcctcccagcagcctctgcgacgggcgcggtgcgtaagtacctcgccggtggtggccgttctccgtaagatggcggaccggcggcggcagcgcgcttcgcaagacaccgaggacgaggaatctggtgcttcgggctccgacagcggcggctccccgttgcggggaggcgggagctgcagcggtagcgccggaggcggcggcagcggctctctgccttcacagcgcggaggccgaaccggggcccttcatctgcggcgggtggagagcgggggcgccaagagtgctgaggagtcggagtgtgtgagtgcgcgcaggcggggcggggtggggaccgggcggcgagccggccgggggcggggtgtaggtgatgctaggtagtctgtgagttgatagtagatactgggacttttttttgtttttgagagaaaaggggagttatcccaatgcgagtttgcatccggagttccaagggaagaagaaggattgggggtttctgggaggatggtagagccgctggagatggaaagcggatgttttattcagaagtcggggctggagggaaggagaccagacctgccttggctactacttgataaagatttacctatctctgtctccctctccaaccattttgtgctgaatcttcagcttttcacccacatttctttattgggctccccacctctggaaatcacagaactaacccatgtcttctgctttctttcaggagagtgaagatggcattgaaggtgatggtgagtagcatcttttaccccattaggacaagagttttttttaacataaactcaggtcatctatttccaacatcgacattctcacacactgtcacggatttagggccacagagtgcctttttgtaacatagtggttaagagcataggctttagcagtatagtcttcagcaagttaccctctgagcctgtttctccttttgtaagtggggactataattttatccacgttgtaggttgatgtcagaattaaatgagactcttagtctgacctgtaataagcagccaaaaaatgtttctgggtttctttttttccacatatttctgttttatttcagctgttctctcggattatgaaagtgcagaagactcggaagtgagtatgacaggttttttcctatggtatagatcagaaatgctttttaaaaacgtgtacacaccttcgttgcaaacgtaccatgacctccgtgtttatcctcttgtgtattcttcatttatgcttctgaaaaagtgttacagaaggtcttgttcactttagacctagggaaaacttggggcacgccgtctcaagccacaggtgttatactgttagttggcttctcttcctgtctgaagaatatgaggttctaaataagagagtgaggatatcttgaagtcctctgaaagatgtttgacagtttgttttatgcagtgtaggttgagaagccagccaattggttatttttttccaaatctatctgaagactttgaaagggtaggattcggaatgttttgtgccaagagcatccatcattttataggtggggatttttctgtttttaggagaaagtttcctgtcttttggataaactactagagatgccatcagagtaagtgtttgtttcctgggttgttgagtggactcctgagttctggtaatgggattatatatagggggaattggatggtggatcaaagattttgtctatacatttttagaactgttactacattttagaatctgttaagcccttgaggatggaatagtgaacactataacaaaattcctatctttagagatcttacaactcaataaggaagtcagacaaacattcaagcaattgtaccacttgctgataggggatagcactgggatagggctaagtagggtgttacagctgggtactgaatccatcttaggcagtcgggaaagattaaacagttggctgggtaagatgtgttctaggcagagagaacaacagtcaagaaagcccacaggggccgggagcagtggctcacgcctgtaatcccagcactttggaaggctgaggcagacggatcacttgaggccaggagtttgagaccaacgtggccaaaatggtgaaactccatctctggcccggcgcggtggctcacgcctataatcccagcactttgtgaggcccaggcgggcggatcacgaggtcaggagatcgaaaccgtcctggctaacatggtgaaaccccgtccctactaaaaatacaaaaaaaaataataataaattagctgggcgtggtggcgggcgcctgtagtcccagctactcgggaggctgaggcaggaaaatggtgtgaatccgggaggcggagcttgcagtgagctgagattgtgccactgcactccagcctgggtgacagagcaagactccgtctcaaaaaaaaaaacccatctctactaaaaaatacaaaaattagcttggtgtggtgatgcatgcctgtaatcgcagctacttgggaggctgagacacgaaaatcgtttgatcccaggagatggaggtggcagtgagctgaaatcatgccactgcactgctacctgggtgacagagtgagactctgtctcaaaaaaaaaaaaataaataaataaaagaaaggctgtaggggtacaaaaagaatagtaattagaatgaataagatctaaacccagcgcgatggctcacacctgtaatcccagcactgtgggaggccaaggtgggccagtcacttgaggctaggaggtcaagaccagcctggccaacatggcaaaactccatctctactaaaaatacaaaaattagcagctcatggtcccgcatgcctgtaattccagctactcaagtggctgaggcaggagaatcccttgagcctgggaggtggaggtggcagtgagccataatcacaccactgtactccagcctgggcaacagagcaagactcttgtctcagaaaatttaaaaaataaaaatgactaagatctagaatttcatatttgcaacatggtgactacagtcaaccagtaacttattgtacatttaaaaataactattggctgggcacagtggctcatgcctgtaatcccagcacttcgggaggctgaggtgggtggataacaaggtcaagagattgagaccatcctggccaacatggtgaaatctcgtctctactaaaaatacaaaaattagctgggcgtgcttgcacgcccctgtagtcccagctactcaggaggctgaggcaggagaatcgcttgaatccgggaggcagaggttgcagtgagccgaaatcaagccactgcactccagcctggtgacagggcaagactccatctcaaaaaaaaagtatatatatatattaataaaagaacgtaattgaattgtttgtaacaaaggataaatgcttgaggcgatccataccccatttacccttacatgattattacacattgtatatctatataaaaatatctcatgggccgggcttggtggctcacacctgtaatcccagcactttgggaggccgaggcgggtgaatcacctgcggtcaggagttcgagactagcctggccaacatggcgaaacccattttcagtctctactgaaaataagaaaaattaagtaggcgtggtggcaggtgcctgtaatcccagcgactcaggaggctgaggcaggagaatcacttgaacccaggaggtggaggttgcagtgagccaagattgtgccattgcacttcatcctgggcaacaagagggaaactctgtctcaaaaaacaaaaacaaaaacaaaactcatgtactacataaatatatacctactgtgtactcaacaaaaattaaaaactttctttttctttttttttttttgcttgagatggagtcttgctctgtaacccaggcaagagtgcagtggcatgatcttagctcgctgcaacctccacctcccgggttcaagcgattctcctgtctcagcttcccaagtagctgggattacaggtgcacaccaccacacccagctaatttttgtatttgtagtagagacggggttttaccatgttggccaggctggtcatgaactcgtgaactcaggtgatccgtccgcctcagcttcccaaagtaccgggattacaggtggattacgggtgtgagccactgtgcccagccctcttttttttttttttttttttttaaaaaagaggcagggtctcactctgttgcccagtcacccaggctggagtgcagttgtggggtcacagctcactgcaacctcaaactgctgggttcaaccagtcctcctgccttgacctcctgaagtgctgagattacaagcatgagccaccatacccagccaaaaaaaaaaaaaaattaagttttttttttttttattgagatggagtattgctctgttacccaggctggagtgcaatggctcgatctcagctcactgcaacctctgcctcctgggttcaagcgattctcctgcctcagcctcccgagtagctgggattataggcgcatgccaccacgcccgcctaatttttgtgtttttagtagagatggggtttcaccatgttggtcaagctggtctcgaactcctgacctcaggtgacccacccacctcggcctcccaaggtgctgggattacaggcatgagccaccgtgccccccattttttttgttttgttttgttttgttttttaagacggagtctcattccgttgccaggctggagtgcggtggtgcaatctcggctcactgcagcctccgccccgcctggttcaagtgatttctcctgcctcagcctcccgagtagctgggactacaggtgtgcaccaccacgctcagctaatttttgtatttttagtagagacggggttccaccatgttggccaggatggtctccatctcttgacgtcgtgatccacccacctcggcctcccaaagtgctgggattacaggcgtgagctactgcgcctggcccaaaatttttttaaaaagagaaaaagcccagatagagaagatagagagcgtttgggaacttgggagtaattaggtgtgactggagcattgttgggacaggataggtattagaaataaagacaaattggtgagcaggggccactaattggtgaggtgggaggattgcttgagcctgggaagtgaaggttgcagtgaatcaagattgtatcactgtactccagcctgggcaacagagcaagaccctgtgtcaaaaaaaaaaagtgatgcgattggatttatttattcattttttaaaaatttttatttactgttttttgtttgtttgtttttttaatttttagtagagatggggtttcaccatgttggcaaggctggtctcgaactcctgacctcaagtgatctgccggtcttggtttttcaaagtgctgggattacaagcatgagccactatgctttgtctgatttaaattttaaagatgtgtttttcagatccagagaacacttgcatcagaaaatccaattagccattctctactgaaacagactcttgggaggggcattggagactcagacatttatgtattaaagaatatcccaggttgatgctatgtactgtaaaatttgaggattcttttatagcagttattttgtccacagtgaagagaaacaagatcagagacagaaaagctagttaagaaagctattgtaggaatctagttaagtagtgagtgtggcatggaatagagtggtgatagtgaaaatagaagtggacagaattcagagttagaagtggttttgggatggggaatatttgctgcagtacagatgctttttgatttatggtgtagttacatcccatcctggtaaacccatcataagttcagaagttcaagataacttcttggctaacttggagcagcaactctctgttgctatccagcatctcgagaagtacgatttctttttttttttttttttctttttttaagacagagtctcactctgtctcactctgtctgcagtggcgtgatctcagctcactgcaacctctgcctcccgggttcaagcgattctcgtgcctcagcctcccaagtagctgggattacaggcgcacgccaccatgcctggctgattttttttgtatttttagtagagacggggtttcatcatgttggacaggctggtcttgaactcttgacctggtgatccgcctgcctcggcctcccaaagtgctgggattacaggcatgagccacagtgcctggcctcttttttatttttttaaaaatatttttaatagagatgaggtcactctgtgttgcccaggctgatcttgaactggactcaagggatcctcccaccttggcctcccaaagtgctgggattacatgtgtggtgagccactgcacccagctgagaagtacagtttctactgaatgtttatggctttcataccaccataaagtcaaaattataagttgaaccatcatacatcagggaccgtctgtagtcactagagaatggaaacgttggagaaactgacaggcaatatggagtgttcattgagttttggggattgtgaatttatagcagcttaccattctatatgtaagggagtttggatgttttcctaatggctaggaaagaagtaccactgaaggcttaaatgtgggggatgaattgtgggtgaggcacaaaggaagactagaggcagaagagctgtttagaggttgttaggatagtccaaggagcatgacgatggtgcccctaaagaaggttcatacttgttggaatggcaagatgtgggacagattagagagagattctagtgtactaacaaccccttcattgattgaatgtggaacctaaattaaggagtcaaaggaggccaggtaccttggctcatgcctgtaatcacagcattttgggaggctgaggcaggtggattgcttgagcccaggagcctgagacccacctgggcaacatggaaaaatcctgtctctacaaaagaaaagtagaaaaaaaaattatccggtcttggtggcgcaggcctgtggtcccagctactgaggaggttcaggcaggaggatcatctaagcccagggaggtcaaagcagtagagctgtgatcactccacagcactccagcctggacaacaaagtgagaccctgactcagaaaaagaaaaaggagtcaaaggaatgtgcaggttgatgaatggtgttgaatggtgttaactgttaaggaagggaccccaggagaagagttctggaaggacagttgtgggttaggttttggatgttttgagatcgagaaggtgtgggacttttaggtggtgatacctggtaaatagtttttgattcctaattgctcatacctttctgagttctcatttcatttttgagtttttccaattctgattgatgttctttcatgccttatataattttcttaatgtctttttagcttattttgaaatagaagttgcaattttgatatgatatgcggatgtctttctggcatgctttcattgtctgtaggaatgctattattttttcttattataactttatgggatttaacttctgtattttctgttcatttttatgtaaaattagttttcctggtcttttcgaaggaagcatgatttagaatagctttttctaacttcacagagctgcttctgttgtttttctgtggtggtgagaaatatggtggcttgctttctgagatttgttgcttttgttccctttcccagcttgttctggaccatccctgtcctactgaatttggtcctgctctcaacagtttctcttctaggaactcccttctagggacagtgtagggccctgtccccagaaggaagccctggcagccaggtcagcttcatcccttcagaccttttttttttttaagacagagtctcactctgtcgcccagactggagtgcagtggcgcaatctcagctaactgcaatctccgtctcctgggttcaagcgattctcctgccttagcctcctgagtagctgggacctcgtgtgtcaccgtgcccagctaatttttgtatttttagtagagatgaggtttcaccatgttttccaggctggtctcgaactcctgactcagatgatccacccaccttggcctcccaaagtgatgggattacaggcatgagccaccgtgtgtggcccccttgctagttgtaagtgctgttctcagttttgactgttgtgctttcccttgactgcctgttgattatttcagtgttctcctgttctcaggtccatttgctttctctctgctttctcctgcgtggacaccagtactatacaggtcctacagctgttggtgctttgttatgcacttacattttgggtcttgggggatacctggtaacttaactttgttgcagtgttgtctgaaggttttggtttcttttttattttttgagacagagtcttgctgtcgcccaggctggagtgcagtggctttgccttccagattcaagctattcttgtgcctcagcctcctgcgtagctgggattacaggtgcgtgccaccatgcctggctaatttttgcatttttagtagagacgcggttttaccatgttggccaggctggtctcgaactcctggtctcaggtgatccacccacctcggcttcccaaagtgttgggattatggacgtgagccactgtgtctggccagggttttggtttgggtctcggttttgctgtccagagctctcattccatgtggagatttgaagagagataaaactgtgccactgccattttctgagagtcttccaagaattcttttttttttttttttggcaaatgggtctccttattttgcccaagctgagcttgaacttgaacttacaatcctcatcagcctcttgaatagctgagacaataggttcatgccactgtgcctggccaaaaaaacttgttaaagaaatttgactgagggaaggctgaagagatggtagttggagaggtagctttgagatcaagaggtgatttggatgttttttaaaaagttaggagagtatcaaataaggtcaaagattgaaaaaaagaaaagaaagggggaaaaaagagagggaatagataatgatattgagtactggtatttttgactgagtatatgagaaaaagtaggaaccagacaagattaacatcttccattgtaattacagagaagtgggaaggaaaggtatgtgcaaaggaagattagaaaggagggaaaagctgggtgcggtggctcacgcctgtaatcccggcactttgggaggccgaggcgggcagatcacgaggtcaggagatcgagaccatcctggctaacatggtgaaaccccgtctctactaaaaatacaaaaaattagccgggcatggtggcgggcacttgagcctgggcgacagagcgagactccgtctcaaaaaaaagggaaaaaaaagagggaatagataataatattaagtactggtattcttgactaagtacatgagaagatgtaggaaccagatgagaagtatcttccattgtaattacaaagaagtgggaaggaaaggaagttagcgttcctttctgtgttttgtttttgtgaaatagaaggatagagcaggacaggcacggtggctcacacctgtaatccaagcactttgggaggccaaggcaggaggattgcttgagcccaggaatttgagaccaatctgggcaacaaagtgagaccctctctctacaaaaaatcaacctggcgcagtgatgtgtgcttatgtcccagctacttgggagcttggagtgggaggatcccttgagcccaggaggtcgaggccacagcaagctatgattgcaccactgcactccaccctgggtaacagtgtgagactctcgaaaaaaacaaaagaatgacatctgcttcaaaaagtaagagtgtgtgcgtgtgtgtgtgtgtgtgtgtgtgtgtgtgtaaccccctttggcaatggagtagtctgttgtaggcctggagaaagcagacatttgaattgatccagttccaggcatatgggagtggcaagagaaatgggatgttactagtagtgattgaaatgaatgagctatggagtctagagagagaagaaagtgaatgtgagaaaggactgataggcagaagttagaagcatcaagggaatggatgcattgaaaaattagagacgagacagtaaggaaacaactaggaataagaggcatttttttaaaaaactgctttattgtggcaaggcgccgaggctcatgcctttatcccagcactttgggaggctaaggcaggcagatcacgaggtcaggagatcgagatcatcctggctaacacggtgaaaccccgtctctactaaaaatacaaaaaacttagccagatgtggtggcgggcacctgtagtcccagccactcgggaggctgaggcaggagaatggtgtgaacccgggaggtggagcttgcagtgagccgagatcacgccactgcactccagcctgggcgacagagtgagactccctctcaaaaaagaaaaaaagaaaaaaaactgctttattgagatacaattcacagaacgtacagttcatttatttataaagtgcataatttagccaggtgcgtgcctgtactcagctactcaggaggctgaggcaggaggaatggtcggcccaggagttcgagaccagcctgggcaacatagtgagacctcatctctttttatttgtttgtgtgtttgtttttgagacagagtcttgctctgtcacccagtctggagtgcagtggcacaatcttggttcactgcaacttgaccctctggggttcaagtgattctcgttcgtcagcctcccggatagctgaggttacaggtatgtgccatatgcctgcctaatttttagtatttttagtagagatggaattttgtcattttggccaggctggtctcaaactcccagtctcaagtgatctacccacctcagcttcccaaagtgctgggattacaggcgtaagtcaccacgcctggcccgtaagaccttatctctataaaaaataaaaaatttagccaggcgtggtggcgtgcacctgtagtcccagctacttggcaagctgaggcaggagaattgtttgagcccaggaggtcaaggctgcagggagctgtgatcataccactgcactccagcttgagtaacagagtgagaccttcatctcaaaaaaaaaaaaaaaaaaaaggaaggaagaaacccagttctcccatccttcccgtagcctcaagcaaccgcaaatctactttctgtctctgttgattttcctattctggcctttcatatgaatggaattatgtaatatgtagatttatgtgtctggcctctttcagtataatgttttcatctgacttgtagcatgtatcagtacttcattccttctttctgcctccccaccccagctttattgaggtataactcacaaataaaaattgtatacatttaacacatacagtgtggcatcttgatatatgtgtacattgtggagtaccacagttaagctaattaacgtatctatcacctcacctagttaacctttttgtatgtgtgtgatgagaacaccgaagagctactctcagcacatttcaagtttacaatatgttatttatttttattttacatggtttaaaaagagacagaacctttgtcacccaagctggagttcagtgatgcagttatagctcactgcaacctcaaactcctgggcttaagcaatcctcccacctcagcctcctcaatagctgggactacaggcgtgcactaccatgcccagctaatttatttatttgtttttatttttattttttttttgagacggagtttcactcttgttgcccaggctggagtgcagtggcatgatctcagctcactgcagcctctgcctcctgggttcaagcggttctcctgcctaagcctcccaagtagctgagattacagtcatgcgccaccaagcccagctagttttgtatttttagtagaggtggagtttctccatgttggtcaggctggtctcgagctcccgacctcaggtgatccacccactcagcctctcaaagtgctgggattacaggcgtgagccaccatgcccagccgcccagctaatttttaaacaaattttttgtagaggcaaagaatcgctgtattgcccaggctggtcttgaactcagcttcaagcaatcctccagcctcagcttcccaaagtattaggattacaggcatgagccaccatgcctgaccaagtatacagtacgctattattattattattttagacagtcttgctctgtagcccaggctggagtgcagtgttacaatctcggctcactgcagtctctgcctcccaggttcaagcaattcttctgcctcagcctcctgagtagttgggattacaagcgcccaccaccacgcccggctaatttttttatttttagtagagacagggtttcaccatgttgcccaggctggtctcgaactcctgacctcatgatctgcccacctcggcctcccaaagtgctgggattacaggtgtgagccaccacgcccaaccagtaagttattattaactatggttaccatgctgtacattaggtctccagaacttataactgaagttttatatccttttaccacgatctcattttcgctacccttaagccctagaaacccccttcctactctctgtttctatgagtttgacttgagatcatgtggtggttatctttctgtgtctagcttattttacttagcatagttccgtctaggttcatccatttgttgtcacaaatgtcaaaattttttttttagggcagaattagattccattgttcgtgtgttccacattttctttatccattcacccaacaacagacacgagttatttccatagcttatttccatcttttggttattatgaataattctgctacaaacattagtgtacatgtttttatggggacatatgttttcacttctttttgactatgtacctaggaatggaattgctgagtcatgtggtaactctgtaatcatttgaggaactagaaccgccatactgtttccaaggtgctgcaccattttacgtgactagcagcagtgtatgagggttccagtttctctatatccttaacagcacttgttgtgttatttacccaggtgcatgcctgtactctcagctactcaggaggctgtggcagtaggatttcttgggcccaggagttcgagaccagcttgggcaacatagacctgtctaaaactttttttttttggcggggcacggtggctcacgcctataatcccagcactttgggaggccgagtcagacggatcacttgagatcaggagttccagaccagccttgctaacatggcgaaacctcgtctctgctaaaaatgcaaaaattagccagccactgtggcacgcgcctgtaatcccagctattcaggtggctgaggcataagaatcacttgaacccgggaggtagaggttgcagtgagccgatttgattctagatgtcctattaggtatgagatgttttctcattctgatttgcatttccctgatgactaatgatgctgagcgtttttttttttttttttttttggtgcttattggccatttgtgtatcttccttgaagaaatgactattcagatacctaggcaattttttaaaaattaatttttaattattgtttttattttttttagagacaaggtcttgctgtattatccagagtggtctcaaactcctgggctcaagcaagcagtcttcccacctcagcctcctcagtagttgagactataggcatcagccaccacacttgatctttgcccaaagtagctgggattacaggtgtgcgctgccatgcccggctaatttttgtatttttagtagagacgaggttttgccatgttggccaggctggtcttgaactcctgacctcaggtgatctgcccacctcagcctcccaaagtgctgggattacaggtgtgagccactgcgcttggccatttttttttttttaattgagatgtaagagttctctatatattctgtattctagatgtaagtcccttatcagatatgatttgcaaatatgtgttccctttctgtggattgttcactttctttatagtgttctttcaaggacaaaggttttagttttgatgaagcctggtttatgtttttccttttgttgcagatgcttttggtgttaggtatctaagagtcatttgccaaactgagagtcatgagtatttactcctgtgttttcttctaagagttttatagtttcaactcttaaatttaggtctttgattcattttgagttagtttttatatgtggggtaaagtaagggtctaacttcattctttttgttttttgagatggagtctcgctctttcacccaggctggagtgcagtggcgctatctaggttcactgcaagctctgcctcccgggttcatgccattctcctgcctcagcctcccgagtagctgggactacaggcacccgccaccacgcccagctgattttttgtatttttagtagagatggggtttcaccgtgttagccaggatgatctcgatctcctgacctcgtgatctacccatcttggcctcccaaaatgctgggattacaggcatgagccactgcgcctggccaacttcattcttttgcacgtgacgattttggtccatgactcgggtgtttatacgtaaggttttattttgttttgttttgtttttttgagatggagtctcattctgtcacccagcctggagtgcagtgtcgctatcttggctcactgcaacctctgtctcctgggttcaggcgattctcctgcctcagcctcccgggtggctaggattacaggcatgagccaccacgctcagctaattatatttaaggttttaaaagtggagcagttttacttataataaagcatagcagttctaggtaagactggtttggagtgcagccatggaaatggatggctgaagtgcaggtgaagactgacctcagtgctaaagtcttcctgtcaacgacaggcccgtggcctcggaggagccggggtttattaaaatgaggctagaggagttagatctgaaagagacattgagaataaggataccaactccatctcttagtctgaaatatgtgggaagtagaagaatgagctaaaacttctgtattagaatttttcaaaggaacagttccttcagggtggagctagtaagaattggaaagagtacactgaaatggtgggtgatgtaggggagtttgtctcttctggaaaaaggttttgatgacatccctttgccaaagcagtgtgaccgtgtggtagcaccttggcttcagttagactaagctttgactaatttggagcctcctcagtactatgctatttgtatctgttctgccctggaaacaaaattagtttttcacttaaaataaagttgccttatttgacatcctaccacagatcagagggtggagcataaaacaagctttccttattaatcatgtgataatactatttaaaggtatttgaattaaatcagtacgtgtgtgtagggagatggagaattaaagtcacatacaccaagttattgtaatttctgcttgaaaatcttcagggaacataggatcaaggaaagaactgaatgattgccacctacccatcctagtcttgaggaggaaaaacttcatgtaattaagggaaatgggaagaatcaatggtgctcagttgttaaaaagctataggtaaaggcttgattctgatagtgtgggtatagtcaaacagtctccctctattctgttacctttctgagagtcctaacccaaaacactcaaggccaaaatagttaacctttgaacggccaggcgcggtggctcatgcctataatcccagcattttgggaggccgagacaggcggatcatgaggtcaggagatcgagaccatcctggctaacacgatgaaaccccgtctctactgaaaatacaaaaaataattagccgggcatggtggcgggcgcctgtagtcccacctacttgggaggctgaggcaggagaatggcatgaacccgggaggcggagcttgcagtgagccgagatccagccactgcactccagctggggcgacagagtgagactccgtttcaataaaaaaaaattaaaaaaataaaatagttgacctttggacaacatgggagttaagagtgcctatcctgtctgggtacagtcactcatgcttctaatctgagcactttagtgggccaaggcaggaggatcacttgagtccaagagtttgagactagcctggacaagaaagcaagaccctgtctctacaaaaaaaaggacaaaaattagctgggcatgatggcacgtgcctgcagtcccagctactcaggaggctgaggcaggaggatcactcgagcccgggagtttgaggctgcagcaagccatgatcacaccactacactctaccctgagtgatacagtgagaccccatctgttaaaaaaataaaagggggttggccgggcgcggtggctcacgcctgtaatcccagcactttgggaggccgaggcgggtggatcacgaggtcaggagatcgagaccatcctggctaacatggtgaaaccccgtctctactaaaaatacaaaaaattagccaggtttggtggcgggtgcgtgtagtcccagctactcgggaggctgaggcaggagaatggcgtgaacctgggaggcagagtttgcagtgagctgagattgcaccactacattccagcctggacaacagcgagactccgtctcaaataaataaataaataaataaataaattaattaattaattaattaaaaggggctgggcgtggtgcctcatgcctgtaatcccagcacctcaggaggccgaggtgggcggcttgcctgagctcaggactttgagaccagcctgggcaacatggtgaaaccttatctctactaaaagtacgaaaatagctgggagtggtggcatacgcctgtagtccctgctactcaggaggctgaggcataagaattgcttgaacccaggaggtggaggttgcagtgagctgagatcgcgccattgcactccagcctgggcgacagagcaagactctgtctccaaaataaataaataataaataaaatataaaggacacctatccctgttgcagtaagaattccaagtataacttttgactcacccaaaacttaactactaagtcaactggaagccataccaataacataaacagtcagtgaatatgtattttatattttatgtgtattatgtactgtactcttacaatgaagctagagaaaagaaaatgttattaagaaatcattcactattaaggaaacatactattcagtggaagtggatcatcataaaggtcttcatcatctttgcattgagtagacttcagaagaggaggggttgatcttgctgccttgggtgacagaggcagtggaaggagaggcaggcatacttgctgcaacttctattgaaaaaaaatttgcgtagaagtggacctgagtagttcaaaccccttgttccagcgtcaactatacccagatgctgagcagggaaaaatgaggaagagggattaattggcttgtctgggccaatcaggctgactcagctctatttgaagagatggcagaaacttagagtttgagagtttctcaatcaggaattcaggaatctcatgttgagcctctttgaccagattattggggccagcctgggtcttgagtgacagggcagtctggttcagttcaagtatcagacccagtaggtgagtgagagaccagtgtacatacatctaccaggtttcagatgtaacccaccaatgaagactagaccacctttccttgaacccatttctctgtgttctcgtaggcctccctagccatagctctgcctccttaggtccaaatctggggaggacaaggagaggagagtaaccctattctaaagccagttcccttatcatgagccttagctgctgccttttcctacctagaactagccacacgtccatttcctggccctttctaatggcctaatgatcctttgtgtgtagacccagcactttctgtgtcatgaacagtgttacccaatcttgatgtggtaaaagagggaagaagatagtaaaaagagagagagagcacttggactaatttttttcatttctgaaatgtgatggttgtacaagttgtcctttaaggttttttaggtcaaatttttgtaattatgtgattctggatatgttctggctgcaggaattttctgctgcagaaaaccagtactcataggcattaaaaaaagctaccattttccagcttgaggataagtgcattgggaaatcatggagtcattatcaagagtttgcacatctggttgggcgcagtggctcatgcctgtaatcctagcactttgggaggctgaggcaggaggttcgcttgagctcagaagtttcagaccagcctgggtaatgtggtgaaactctgtctctacaaaaaatacaaaaattagttgggcatagtggtgtacatctgtagtcccagctacttgtgggggctgaggtgggaggattacttgagcccaggaagtcaaggctatagtcagttgagatcacaccactgcactccagcctgggcgacagagtgagaccctgtctcaaaaaagagttgcatgtctactcattcagttctcattatctatagactaaaatatacatctccccccttatgtactactatttttgaatatatgtaaattaataaaatgtaaacttaaagtgttattgaatgtataacagtttgttgttttttgtttgtttttgagacagtctctgttgtccaggttggagtgcagtggtgcgatctcggttcactgcaacctctgcctcccaggttaaagtgattctcccgcctcagcctcctgagtagctgggactacaggcacgcacgcatcagttcattgtgtgtttttttttttttttttttgagacaggatctctctctgttgctaagactggagcgcagtggcacaattatggctcactgcaacctctacctcctgggctgaaatgatctcacacctcagcctcccaagttgctgggactataggcgcacaccaccattcctggcgaatttttttttttttttttttttttttgacagggtctcactcttttgcccagactagtatcagtggtgcaatcttggctcactgcaacctccacctcctgggtttaagcaattctcttgcctcagcctcccaaatagctgggattacaaattcatgccaccatgtctggctgatttttgtatttttagtagagacagggtttcaccatgttggccaggctggtctcaaactccggacctcaagtgatccacctacctcggcctcccagagtgttgggattacaggcgtgaaccactacatccagcctagcagttgtttgtcattgtatgttttctcagtgaatatctcatggggatccatgaaaatttttagatcctaaaaaggggtccgcataatcaaaaaggttgggaatttctgctctaagccattttgagatgggagagttcacaacttacgtcaaagtatagttattaggcactgcatgtttaagagacaattcatgggccaggtacagtgttcatgcctgtaatcccagccctttgggaggccaagggaggaggattgcttgagctcagcagtttgagaactgcctaggcaacatagcgagacctcgtctctactaaaaataaaaaaaaatcagccaggtgtggtggcatgtgcctgtagtcgcagctacttgggaggctgaggtgggaggatcacttgagcccaggagattgagattgcagtaagccatgattgtgccactgcactcctgggcaacagagcaagaccctgtctcaaaacagaaaaaaaaaaaaagataattcatggagagagagattatcaaggaagattaagctcctcttatatgttaggtatcgtatagtaagtctcccttccattcttatcctctgggcccattagaggctgccgctgtttttttgtttttttgttttgctttttcgagatggagttttgcttttgtcacccaggctggagtgcagtggcacaaacttggctcactgcaacctccgcctcccggctaatttttgtatttttagtagagacagagtttcaccatgttggccaggctggtctcgaactcctgacctcaagtgatacgcctgcctcggcctcccaaagtgctgggattacaggtgtaagccactgcgcccagcctgccacttttaataattcttgcatatgttccaggaatacctatgtggatatatatgtatgtatgtgtgtattttttttaatgtgatatttttaaaatagtgtcttttttttattattactattttttgcgacagagccttgctctgtcgcccaggctgaagtgcagtggcgcagtctctgctcactgcaagctctgcctccctggttcaaacgattttcctgcctcagcctcccgagcagctgggattacaggtgcctaccaccaagtgcggctaattcttatatttctagtagagatggggttttgccatgctggccaggttggtctcacactcctgaccgcaggtgatctgcctgcattggcctcccaaaatgtgattacaggcgtgagccactgtgccaggccaaaataggatctttattttctagaaatatgggtaagaatattgatttgtttgcttttcagttctatgttgtactaaaaatttattgataaatgtattcctaaagagtagaaaattgaaatgcagccaggcacggtggctcacgcctataaacccagcactttgggcggccaaggcaggcagatcacgaaatcaggagttcaagaccagcctggccaacatggtgaaacctggtctctactaaacatacaaaaattagccaggcgcggtagtgggcgcctataatcccagctatttaggaggctgaggcaggagaattgcttgacccctggaggcagaggttacagtgagctgagattgtgccactgtattccagcctgggtgacagagactttgttttggggttgggggcaggggtgggaattaaaatgcaccgttcagatcttatatgcatcgctgacagggaaacttttttcagggtgaagaaggtgaatacagtgaagaggaaaactccaaagtggagctgaaatcagaagctaatgatgctgttaattcttcaacaaaagaagagaagggagaagaaaagcctgacaccaaaagcactgtgactggagagaggcaaagtggggacggacaggttagtacattccacagtcctccattttagaggctggaatagagattcttgaggcttggaagagtaaggatccctttatctgtcctctaggagagcacagagcctgtggagaacaaagtgggtaaaaagggccctaagcatttggatgatgatgaagatcggaagaatccagcatacatacctcggaaagggctcttctttgagcatgatcttcgagggcaaactcaggaggaggaagtcaggtaaaagccacttgctgctgctgctgtctaacatgtattttacacatgtaggccaggtacttcgatttgcctgtatttcatttattacagcattttaagataagtattatgattatccttatcgtacaaatgaggaaagtaggcttagaatatttggtaactcttggtgaggcagctaagatacagacctaggacagtttgtttccagaactcatcttctcttaattattatacttttgcttttcttagtctgaggtgtaaggcgtctgagaagtgaaatacttgcataggttgccttttaggagaaaggagatgtttcaaaggtactgaatggcatgaaatgaagtctttttctcatttctgtgtctgttatatttgagcccagcaggccctgaggttctgtgattcacgcttgctttggggaggcctgttttttataatctctttgggatgatgaggagactacgtaaagttcctattgtccccctgcctccctgacccattttgttcaagaacatctctacttggagaattctgctgacccaagacacttttccttcattttatccagacccaaggggcgtcagcgaaagctatggaaggatgagggtcgctgggagcatgacaagttccgggaagatgagcaggccccaaagtcccgacaggagctcattgctctttatggttatgacattcgctcagctcataatcctgatgacatcaaacctcgaagaatccggaaaccccggtgaggacattttagaacataagaccaggctgggtatggtggcttacggtggcttacacctggaatcccggcactttgggaggctgaggcaggaggattgcttgaggccaggagttcaagaccagcctggggaacatagtgagaccctgtctccaaaaaaaaaaagaaaaaaaggaaaaaaaaaatagagtgtagactcttgatatcttttagaaagaattctctttgcttttctttttatttatttatttaagacagagtctcgctgtgttgcctaggctggagtgcaatggcatgttctcggctcactgcaacctccacctcttgggttgaagtgattctcctgcttcagcctcctgagtagccaggattacaggcgcgtactatcgcgatcggctaatttttgtatttttagtagaaatgaggtttcgctatgttggccaggctggtcttgaactcctggcctcaagtgatctgcccgtctcgatctcccaaagtgctgggattacaggcctgagccaccgcgcgtagcctccttttgttaatttcctaacagtttcttcattccattttttgtagatatgggagtcctccacaaagagatccaaactggaacggtgagcggctaaacaagtctcatcgccaccagggtcttgggggcaccctaccaccaaggacatttattaacaggaatgctgcaggtaccggccgtatgtctgcacccaggaattattctcgatctgggggcttcaaggaaggtcgtgctggttttaggcctgtggaagctggtgggcagcatggtggccggtctggtgagactgttaagcatgagattagttaccggtcacggcgcctagagcagacttctgtgagggatccatctccagaagcagatgctccagtgcttggcagtcctgagaaggaagaggcagcctcagagccaccagctgctgctcctgatgctgcaccaccaccccctgataggcccattgagaagaaatcctattcccgggcaagaagaactcgaaccaaagttggagatgcagtcaagcttgcagaggaggtgccccctcctcctgaaggactgattccagcacctccagtcccagaaaccaccccaactccacctactaagactgggacctgggaagctccggtggattctagtacaagtggacttgagcaagatgtggcacaactaaatatagcagaacagaattggagtccggggcagccttctttcctgcaaccacgggaacttcgaggtaggtatcataggattggtggctagctttttcccctttgcatcatcaggtttaggggcatgggacttctgtctcaggaaggtggtgtctgacaaatgtctacttctttttttttgagacagagtctcactcttttgcccaggctggagtgcagtggcgcgattttggctcactgcaaccttcgcctcccaggttcaagtgattctcctgcctcagcctcctgagtagctggggttacaggcgcacaccaccacgcccagctaatttttttttttgtatttttatttatttatttgttttgagatggagtcttgctctgttgcctaagctagatgcagtggcacgatctcggctcactgtaatgtccacctccgggttcaagtgattctcctgcctcagcctcccgagtagctgggagtataggcgtgcactaccacgctgggctaatttttgtatttttagtagagaccgggtttcaccatgttggccaggatggtcttgatctcttgaccttgtgatcctcccaccttggcttcccaaagtgccgggattacaggtgtgagccacagccaccgtgcctggcctttttttttttttttttttttttgtgacagagacttgctctgttgcccaggctggagtgcagtggcacgatcttggctcactacaacctctgcgtccagggctcaaacaattctcctgcctcagcctcctgagtagctgggattacaggctctcaccaccacacctggctaattttttttttttttttttgagacagagtctcactgttgcccaggctggagtgcagtggtgtgatctcggctcactgcaagctctgcctcctgggttcacgccattctcctgcctcagcctcctgaatagctgggactacaggcgcccaccaccgcgactggctagtttttttttttgtatttttagtagagacggtttcaccgtgttagccaggatggtctcgatctcctgacctcgtgatccgcccaccttggcctcccagagtgctgggattacaggcatgagccaccgtgcctggcccacacctaatttttgtatttttcatagagatggggtttcattatgttggccaggctggtctcgaactcctgaccttaagtgatcgacccatcttggcctcccagagtgctgggattacaggcgtgagccactgtgccagccccagctaatttttaaaaaattttttgtagtgatgggtcttgctatattgcccaggctaatcttgaactcctgggctcaagagatcctcctaaagcgctgggattacagatggaagacactgcacctgcccggtcatcattgagcctcctgagtacaggatcattttccacaaaaagtagaagaagacaacgttattatttgaactaatggttaaatatttgaaggcagaaatttattcagttgaattttgatcaagatcttctctaatatatttgaaaggcaagcctcccttatttccttaatcttctagagacagattgcccaatagaactttgtgtaatgattgtacttttgtgtttttgttgttgttgtgtttacatagatatagtttttttttttgtttttttttttttttagatgggtcccactttgtcacccaggctagagtctggagtgcagtagcgtgaccttggctcactgcaacctccgcctccagggctcaagcaatcctcccatctcagcctcctcagtagctaagatcataagcacacatcattacacctggctgattttttttattttttgaaaagacggggggtctcactgtgttttccaggctggtcttgaactcctgggctcaagcagtcttacctctgccacccagagtgctgggcttataagcatgagccactgcatccagccggaattgaacttttaattaattgaaacttaagtgtccacatttggttagtggatatcatattgggcagcatagttttagagagtaagacctacctattacccattttgcctattgtggtttgtttttctccagccagatagatcaaaggatcttcccttagtctgaaatctaacttaaatattggaactcctcaattggagttgcagcacccttcttactattggaggacaatctctagaacattcctttttgtcttgagtcattttagccagaggagaatctcctttcaaacttccaacccagacccctgtgaatggatataatcaagtagatttacaaagcatccctcccttgtccagctgttgctcagaaactcttgggctgagatttttcaatatgttggataatgtaatgtgctaattataatctctcagggattctatgcagggaacaatttgataggaaaaaatttgaatttgattttcttcactgaagtcattttatttttcattttcaagggctttattgctatattaagatggcagacagtggggacaaatttctaaatgctggtgttgacagaaagcagagatagtttatagagaattttattagttaaaagaaaaaaggcattccttatgttgacacttaaacctgtctcttgatagtatctttgagtcccactcacgtatgtctgatctgcagaagtgacttttttggtgtattacaggtatgcccaaccatatacacatgggagcaggacctccacctcagtttaaccggatggaagaaatggtacagaaggggaaaggggtagatgggggagggagctgcctgttacacagcttgttcattgtttaaaccaagataaggtcttttttttttttcttttctttctttctttttttttgagacagagtctcgctctgttgcccaggctagagtgcagtgacgggatcacggctcactgcaagctctgcctcctgggtcccagttcaagcaattctgcctcagcctcccgagtagctggcattacaggcacgtgccatcatgcccagctaatttttgtatttttagtaaagacagggtttcaccatgttggccaggctggtcctgactcctgacctcatgatccacccaccctggcctcccaaagtattgggattacaggcatgagccaccacgcccggccaagataaagtcagtttttccattgattatgcatgtttcttttaatttggatctcctaaatgtaaggtagaaggtttaggttcaaatcttgatatcttttcattatttttcagctcactttgcaaatatccattaaatacctgccatgtaccaagtgtttttcaacacctaaaggaaggtaggacttgatatgagagccctctagaattcttattgtttaggcctctttctttgtctcagggtgtccagggtggtcgagccaaacgctattcatcccagcggcaaagacctgtgccagagccccccgcccctccagtgcatatcagtatcatggagggacattactatgatccacgtgagttttttcttactgttggggtacttttcttggcagggtgaagtgaagtaagataccaggctcctggctcctgaatttctcttctgacctcttatagtggttatcaaacattgtctggttgctgttttcttcgcatggaatattgagaacatcttttaaagggcttggggaacaaggagacttgtccatgtgaagagtaagggtttatgagagtcccaatgtgatatcttacagtgcagttccagggaccaatctatacccatggtgacagccctgccccgctgcctccacagggcatgcttgtgcagccaggaatgaaccttccccacccaggtaagctttgtgtctctgcttatatgcttccagtacctgaggatatatgttgggagtgccacaaaacccatcctcctgagctttgtgctgctagcctgggagtctggccatcctggctgcttgggcaacaagttcctcttgtgtccatcctgaggacttccattctgagcctgattatactgagcagtccagccgggccatcctgtgaaaatgatgttactttatttttcagtttttttcttctccttatccaggtttacatccccaccagacaccagctcctctgcccaatccaggcctctatcccccaccagtgtccatgtctccaggacagccaccacctcagcagttgcttgctcctacttacttttctgctccaggcgtcatgaactttggtaatcccagttacccttatgctccaggggcactgcctcccccaccaccgcctcatctgtatcctaatacacaggtgagatggctaatgatcatgtttttctagatacacattctttaattcagacaggaatgtggtatggggagaatgctaaaggaatttgagagaacattttcagtgccactgatttgtatgtgacaccaagacgcctcttagtggtcaggagctggaaatgcagcttatgtaatgcccatcatctttattcttttcagtttttttctccgttgcccaggcttggagtgcagtggcgtgatctcggttcactgtaacctccacctcttgggttcaagcgattcttctgcctcagcctcccgagtagctgggattacagtgcctgccaccatgcccggctagtttttgtatttctagtagagatggcgtttcaccatgttggccaagctggtctcaaactcctgacctcaaccgatccacctgcctcggcctccgaaagtgctgggattacaggcataagccaccgcacccagcgttcagtttctttaatggtgtttctttcctgtgttgtggtacatcataggtggcaatacctggtttttactctattgcataaagaagctgtattctactccttatcacccctacctctgtcctgcttaacttccaccacgttgacataatcaagtatctgtagtgtcgctactgaactcagccttttccatttgtcagctgatggtaggaattagagaaagctgggcagtactttgaagaaataaaaaccagagcataataatgaagaattaaggcaaaaatgaatagtcactttattttgaagggtgggcagattagatatttttaaaattataaattccccaattctcttatggctgaataatatttcctgttcatcataggttggatgaattcattcctaactttttcttctcctggcttgtggggtcccaggccccatcacaggtatatggaggagtgacctactataaccccgcccagcagcaggtgcagccaaagccctccccaccccggaggactccccagccagtcaccatcaagccccctccacctgaggtatgagagttccttcctatacttaatgcacatgctccgtcagtgggctttccttctccccagaggatttccctcattttctgggtgtgtttctctggaaaacagtctttttgttatgacctgataacaaattccaactttgttatttcaggttgtaagcaggggttccagttaatacaagtttctgaatattttaaatcttaacatcatataaaagtaagtgcacaacttactgtgaatattgttaaaactaatgctcacacttgcttaataaacaaaaatcacttaattaatgctttttttttttttttttttttttttttttttgagacggcgtctcagtctgttatccaggctggagtgcagtggtgcaatctcggctcactgcaacctccatctcctgagttcaagcgattctcttgcctcagcctcctaagtagctaggattacaggcacgcaccaccacacctggctaatttttgtatttttagtgggaatggggtttcaccatattggccaggctggtcttgaactcctgacctcaggtgatccacctgccttggcctcccaaagtgttgggattacaggtgtgagccaccccacccagcctctgattaatgctttaagttataataatcatgggatatctcaggaggcttaaaggagtcctgaaatttgccagtttgtttgtttggcaagtgtattgggcagggttgaagtagaaacgattgttaacatgacagttttcaattgggaagctacaaggaaaaaatacaggaaggcagtcaaggaaaagggaaatctaaatttgagatgttatagcagaaaaaaccagttctaaagatcatagaggagaaggactgggggttttgttgcttttgtttaaggacattacttaaaacacattatttagaagtgtggctttttgaaaacagcttgtgaatgcccagaaggcccactaacactttggtggttcttccctttttccaacccctgtcagagcagcagaggtgagaactcagaagagaaatacagctggctatctactaccagaagggcttcaaagatatagggtgtggctcctaccagcaaacagctgaaagaggaggacccctgccttcctctgaggacaggctctagagagagggagaaacaagtggacctcgtcccatcttcactcttcacttgagttggctgtgttcgggggagcagagagagccagacagccccaagcttctgagtctagatacagaagcccatgtcttctgctgttcttcacttctgggaaattgaagtgtcttctgttcccaaggaagctccttcctgtttgttttgttttctaagatgttcatttttaaagcctggcttcttatccttaatattattttaattttttctctttgtttctgtttcttgctctctctccctgcctttaaatgaaacaagtctagtcttctggttttctagcccctctggattcccttttgactcttccgtgcatcccagataatggagaatgtatcagccagccttccccaccaagtctaaaaagacctggcctttcacttttagttggcatttgttatcctcttgtatacttgtattcccttaactctaaccctgtggaagcatggctgtctgcacagagggtcccattgtgcagaaaagctcagagtaggtgggtaggagcccttctctttgacttaggtttttaggagtctgagcatccatcaatacctgtactatgatgggcttctgttctctgctgagggccaataccctactgtggggagagatggcacaccagatgcttttgtgagaaagggatggtggagtgagagcctttgcctttaggggtgtgtattcacatagtcctcagggctcagtcttttgaggtaagtggaattagagggccttgcttctcttctttccattcttcttgctacaccccttttccagttgctgtggaccaatgcatctctttaaaggcaaatattatccagcaagcagtctaccctgtcctttgcaattgctcttctccacgtctttcctgctacaagtgttttagatgttactaccttattttccccgaattctatttttgtccttgcagacagaatataaaaactcctgggcttaaggcctaaggaagccagtcaccttctgggcaagggctcctatctttcctccctatccatggcactaaaccacttctctgctgcctctgtggaagagattcctattactgcagtacatacgtctgccaggggtaacctggccactgtccctgtccttctacagaacctgagggcaaagatggtggctgtgtctctccccggtaatgtcactgtttttattccttccatctagcagctggcctaatcactctgagtcacaggtgtgggatggagagtggggagaggcacttaatctgtaacccccaaggaggaaataactaagagattcttctaggggtagctggtggttgtgccttttgtaggctgttccctttgccttaaacctgaagatgtctcctcaagcctgtgggcagcatgcccagattcccagaccttaagacactgtgagagttgtctctgttggtccactgtgtttagttgcaaggatttttccatgtgtggtggtgttttttgttactgttttaaagggtgcccatttgtgatcagcattgtgacttggagataataaaatttagactataaacttggctcccttgccagtgttttgcatgagtcttgatttgggagggagggaagaggactccctaattcccccacagggtcacggtcacaactcaggtcagcccaagttgtgaaacagaagcccagagagatgaggagcccctatgaggccataaatgtgtctgcactccccatcagttatcttttttaaccacatagatcaccaggatgtcatgccatcccttagattggaagtgtcagggacagaaaagtagtgagatgctggttattcacatgagcatctagtatcctttatggcttcctttgtgtttggcaagtaagtttcccaaggtaatatgccatcagatgtcaatataactataccaagtcctgggttggggggaagtacaggtagctagctttcttgaaaagtgaagatgctgctggccaccgtggctcacgcctgtaatcccagcacttagggaggccgaggtgggcagatctcgatcagggagatcgagaccatcctggctaaacagggtgaaacactgcctctactaaaaatacaaaaatagctgggagtggtggcgggtgcctgtagtcccagctacttgggaggctgaggcaggagaatgatgggaacccgggaggtggagcttgcagtgagccgagattgcgccactgcattccagcctgggcgacagagtgagactccgtctcaaaaaaaaaaaaaaaaaaaaggaaaagtaaagatgctgacactaaagtattcaggaccacacagtcttagagagactatcagctcaggtaaggggaagggaatttgtgtgtgtgtgtgtgtgtgtgtgtgtgtgtatttttagtagaaatttttgtattttttgtacaacaaattttgtatttttagtagcaatggggtttcaccatgttggccaggctggtcttgaactcctgaccttaggtgacccacctgccttggcctcccaaggccaagtctgagtctgtgttcttaatgtccttgccagtggctctccaccctaccagatccaaagtcacttttttttttttttctgagacggtcttgcccgtcacccaggctggaatgcagtagcacaatcataggttgctgtaacttggaactccaaggttcaagcaatcttgccacagcttcccaaatagctgtgactacaggcccacaccaccatgcccagctaatttttgtggtttgtttttagtagagacgaggtctcagtgtgttacccaggctagtctggaacgccttggttcaaatgatcctcctgtcttagcctcctagagtgctgggattacatgtgcaagccactacacccagccccaatgttcctttcttataacaaatattttgcaacactaatatcccaaagtgaaatggacagataacataacctgcctggacacatgatttcaaaaaacaaatcaactgtgggtcataattcagtttacctagtccacttggcctttgatgcttagagggcagttcctacctttgaagtgactttttcctctaggtcctgggtgggatggaagtttactacagaagctatctctggtatgggagagcaactttcatatggagctggcagcatttgttgggtttcacaaatccatacacgggaggcatagatatcatagtacatcttttttttttttttttttttttttttggtcttgctctattgcccaggctggagtgcaatggcacaatcgtggctcactgcagctttgaccacctgggctcaatcaatccacccacctcagcctctcaagtagctgaaaccacaagcatgcaccaccacacctagctaatttatttttgtagagatagggtcattgaattcctgggctcaagtgatcccgctgtctgggcttcccaaagtgctgggattacaggcttgagctgctgtgcccaactattgtacatcttataaagacagatgggacttcccccatatcttggtgctggtgccacagccagaggactgtgacttttctgagccccgtccctaattccttttttttttttagactgagtctcactctgtcgcccaggctggagtgcagtggcacgatctcggctcaccacaacctccacctcccgggtttaagcgattctcctgcctcagcctcccaagtagctggggtttacaggcgcccgccaccatgccccactactttttttctgtatttttagtagagatggggtttcaccatgttggccaggctggtctcaaattcctggcctcaggtgattggctcagcttggcctcccaaagttctgggattacaggcgtgagccaccacgctgggcccctaattcctctttaaatcatgtcagtttgcttctcttccccacaatgtgatgggtgactgtaggcctgatctcctggggttatgaaaaaatgccatccagccttgggggtgggttactggcaggaggtttgagtgttggatgcttcccctttacccttgcctcttgcttccctagtccttcagttagaccctattgctctctctgttgccctggtaaccagctctgcaagaagaaactcaagctcagcaaagcccccaggttctctctatcctcccagcctgcctctgggtgggcagaaagaagagggtgtgtaagcagcagacagatagcctgaggtggccctgcccagtccccttgtagaagcccatgggctcaaaaaaagctcaaagctttttcgcccccatctcatagttgttattcataccaccctgccttcctctttatttcttccataagcgggtgcaaatgctctgccagctctcttccccttcagggtcagcgcacagacctgctaccttgtaggcaactcggagcaccaaagacttggaattccaaagtcagctcccagcatctgcagcccacttgggttgactgtccgtctagggcagtgattttcaatcctggccatttgtgtcatgtgaggagctttttaaaaaataccataagccttcgccctggttcagaaatctgatttaattggtctgagatatggcctaggcatcagttttttttttgtttgtttgttttttttttttttgagacagtcttgctcttgttgcccaggctggagtgcagtggcatgatctcggctcactgcagcctccacctcccgggttcaagcgattctcctgcctcagcctcctgagtagctgagattacaggcaccagccaccatgcccagcaaatgtttgtatttttagtagagacagggtttcactatgttggccagactggtctcgaacttctgacctcatgttgcacccttctcggcctcccaaagtaccgggattataggcgtgagctgttgcacttggccagtattttttttttttttttaatatggagtctctcacccaggctggagtgcagtggcatgataacagctcactgcaaccttcacctcccaggttcaagcaatccttctacctcagcctccaaagtagcttggattacaggtgtgtgccaccatgcccggctaattttttttgtatttttagaagtggggtttcaccatgttggtcaggctggtcttgaactcatgacctcaagtgatctgcccgccttggcttcccaaagtgttgagattacaggcgtgagccaccaagcccagccagcatcagtatttctgagaagcttccctgtgattccagtgtgtagtcagggtgaaaaccactgccactccaggaggaccatgacttgatgctggctctcctcactgattcaaaatgttgaacttagtctctgcctgacatccttgagcatttgggggagtactggggtcctgtgtcccaagcttctagcttccagaagtctctcagtctgttttattttcaaccccctacacccttcacactccccaattcgcccttcctaaccaacaattcccaaatcctgcccagagagaaggttaccaaggcaaccggcttaatctggtaactgtggcatgtgctgggagagaagcccttccctcttcctattcagttcataaaatgctacctggggagctccaacccattccagccactttcccctttcaagccaggggatattggagtgtccaataaggggagcacaggaagctgatactcagacctctaatacagcttcttagccaaaattgtgcgctgtcttctttttactgtttccaaatccacaaacagatgggtgtgcaaagctttatttctgtgaacacatgctctagcacacatgggaacagatatgcacatacattgatacgtatgtcatacacaccctgttcagttttactaccactcccagccattagcattcctgtctctgcctggttggtgctcggtaaacaggggtggggcattgtccagagagcctcaacccatcgagaacctgctgccactcccacaccttgtaagtctaacctggatgttctcacacttagcatggctttacgatgcacccccctcctcccccacactccttctggggcagcatatccttaaggacagaatgctcctggtgtgggcatcaggagtaaggattacttggagtgctaattggcaccacttttcccactccatggccatgtacacttgggctctgtgcttgatgatagtcggcagttctggggcttgtcacctgtctccatggccctgcttccttctgctgccagctgggctcaggtgcccttgtgctcctggtctcctccccactgcctattatcccctcctcaccccagctagacctgccacaacctgctgctccctgcctggctcctacctgcctgccagtacctgcccacagaccaggcccacaccacctattgtgccctaccagagaggacagatgggcaccgcctccagtggcaatgctaattcacccaagaggccttcccagctcttctcacagaaggaagataaactccacatatttctgtgagtatgagaaaggtgcacactcttgggttcagcaatctgtaggcctgacttgggtacacaggtaggtgagtgaaggtgtccaggccacagacctgtcctgactctttgaaatgatgctgagacccggttatcccttgagccaggaatccttccccattggtaaatctctgacttacctttgcccttaatttcttctgcttagaacccaagtcccttactgtttccctcgcggtcaaccccagcgcgcgagttcaagcctcgtgcggcgcgggggcgagccgaggaagggtaggggcggggactgggcggggactggaggagggggcgcggtctcggttctgccaccttccccctcttcacggccaggagcgcagccgccgccgccgccgccgccgcgtcctctcagccttgcgctccgcccgctgcctctgccgccgcagcgcagagccgggcgcaccggccccgcagcctgcccactcttcgggccgcgtgccggctgcagccggcatggggggttgctgagagcgagcactcctttcctctggcacctcccccggctactggccactggactctggccagcgaggctcggcccctctggcccccagtctggcgcctggcacggccctctactctgctcctccagctctgagcatcgtgtcttcgccgccccccccgcccgcgcctgggatacctgggtcccccggcgacccctaggagaggggcgggggggggcatgaagccgctggagaaatttctgaagaagcagacgtcgcagctggcgggccgaacggtggcgggaggtcccggcgggggtctggggagctgcggtgggcctggagggggtgggggacccggcgggggcggcggtccagccgggggacagcggtcgttgcagcggcgtcagagcgtgtctcgcctgctgctccccgctttcctccgggagccccccgccgagccggggctggagccgccccctgagaggaaggaggagagccggcgggggtcgcggaggagccgggcagcggggggccctgctggctgcagctggaggaggtgccggggcccgggcctctcgggggaggggggcccctgcgctccccttcctcctactcatctgacgagctgtccccaggcgagcccttgacttcgccgccctgggcccctctgggcgcccccgagcggcccgagcatcttctgaaccgggttctggagcggcttgctggaggggctaccagggacagcgccgcctcaggtaaggagccggtgggctcgaacacccagagcaggggctggccccggctcctcttccttgcccttggagcgtaggggtggcgccgtgccggggcttggttatagggttgagtggtccgcggaagccggctaggggcctagcggaggtacagaccctcccgcggaagaggagagcagtactcaccttcctccctacagcagcctcaccctcgtctggagaagcagctgagcctcttactctccttcagccacccttcctttcccctgggcattggagccactgactcccatgggtccctgatgttgaatacctcctcctgtggccccaaattagggcctgacacattaaaatgggagctgcccagcgcagccatgccacccgccagaggtgctttagccctgaaaaccctggggtccctgactgttcagaggcctacacagcgcaggctgacccacccagggaggcagtgccagacaggcacaggccccaagctgccttttaggcatcagcaaagggatgcgttgtccttagcagtttggtgggggggatagtattctccttgggctggactcagaaggtgtctgggaggggagaggtggctgggccggcatcatggccctgcagcatccagggtgtccaagcgcctccagcttccacccttcggtggcaggcctcagcacccggcttttttttttttttcttttggagatgtagtctcactgtcacccaggctggagtgcagtggcgccatctcagctcactgcaacctccaccgcccaggttcaagcgattctcctgcctcagcctcctgagtagctgggactacaggcatgtggcaccacgcctggctaatttttgtatttttagtagagacaggggtttcaccgtgttagccaggatggtctcgaactcctgacctcgtgatccacctgccttggcctcccaaagtgctgggattacaggcgtgagccactggcctggctaatttttgtagttttagtagagacggggtttcggggtttcaccaacttggtcaggctggtcttgaactcctgacctcgttatctacctccccccacccccaccccacggcctcccaaagtgctgggattacaggcgtgagccaccggacctggcacacggcctctttaaaatataatcaccacaccctgagaagcttattccctaaatgatgatactatttcaccactccctttcagcacccctactaaggggcctttgaggaaaccaaggccccaaatctggttagttctgaggtagaagaccgagggttctttaggtctagctctaggcattactctaagcccaggagggtctgaggtttgggagccccggctgaggccctaatggtgagggctttcacacttgctctcagccctcggcagggaaccccaacctagatgtgtggaggggggctccactctcctagatccttctcaagacctgggtcctctcctttggagcaggctgtagttgccctggggagctgacaccttttggatttaattagaaaaatatcagacacacacagctctcctaaccataacttcccgcctacaccacacaccctgtgtctctatgacacattccctagggaggctgtacattggcccagagcctgctttggaaaagacagatgcccaactgtggcccccatatcagcatctccccaactctgccccatcttactcttcctttgctccagcttaggaatcctgtgagataaagtctatgaaggatgtcaggcctctcgtttcctcaccctcatccctgaagctgggggtcagagctggaggctctctgactcattgtaagaacacagcagggtagctgggcagggaggaaaagggagaagctgtctttccccttttacaggggcctggtgccacacgctccgctcattctcccctggggtaagactcctgaaatgtcacccatgttatctggcagcctggatccccagagtaactagtttgggaaattccaaaccagtcccaggtgaatgagaatcagcttaacctgccactctgatgttctccaataaaaccaatgttctcaagtcatcctggtctcctcccagggtgtgtgggaggagagaacttacagaagttactctgaacctaccaaagcctctccaacgtccaagcagccccctctgaccgctaggttttaccctaacactctgcttgcctcaggcatattgagaaaaggacaaagactcaggattctgggttcttattccagctccaggcaagtccctcccagctctgggcctcagtttcacatttgcgaaatgaaatccttgaagtcaattactttgtgttggttttcctcctccgcctgcatggctagaactgaccacaggagatagtgaaccaaggggagtcagaagccttggttttgtcctgggacagtgcctggggacctggccctaaccagtcctggtgaggacacctggctccctccctgcaccttgtctgtctgtgtgtgccaggtggccctgccccaccccagggctggctgcaagtcagggcgaccttgtacccggctgactggctgagccaggcccagacgggggtgtggaggggaaaggggtggtgagaggagccgctccccttcaccattccatcattaacccttctgtctctgggcccctaaaggacacaggatttctatttaaaggttctgggatcaaagtgatggcagtctctccatctcccttttaatcaggctggttcccacctgcctagttagaactcaaagctgttaggtgggaaatggggaggggaagagggatacacacacatgcacacacacagtccccactgatgctaacctctgtgtttggaaatactctttgtctggagacacttctgtgggctacttcttttttcaggcagaactcaaccttggtgtgttatctgaccaacttcccacatacgctgaagagaagtgcacatggccatcaaaggcacgcgccccccccttcccttcagctgccttggcagctgccgaacccaccctcgcagtggctgcccagaacctttacacatgtatgtgtgcgcgtgtgcagagcatgacaaggcaggtggctggggctccagcctggctaaagagaacttgcccttaggggcaagagagggaggcactgcatttccagtttcgttctggaagtgcccacctgacatctgtggtgcccactgatctttacagatatcctgctggatgacattgtccttacccattctctcttcctcccgacggagaaatttctgcaggagctacaccagtaatatccttttgtggagtttggaaaaggagaggtcagaagggagccactccctccgtcccacatgcaatctcagagcctaaactctcccctaggaaacatacctggggccgagtgcagtggctcacacctgtaatcccagcactttgggaggctgaggcaggcggatcacctgaggtcaggagatcaagaccagccaggctaacatagtgaaacaccatctctactaaaaatagaaaaaattagccaggcatggtgccacgcacctgtaatctcagctacttgggaggctgaggcaggagaatcacttgaacccgggaggcaaaggttgcagtgagccgagatcgcgtcactacactccagcctgagtgacagagtgagactccatctcaaaaaaaaaagaaaagaaaacatacctgggtttcagtcccagcttttctactcatcagctgtgtgacttgtacagattacctaacctcatggggactcagtttccttttctgtaaaatggaggtaaatagcacctgccctgcctatctattagctgctatgaagatcagtctgatagcagatgtgggagtgctttggaggctgcagagccctgtacaaatgaaaggtgttatttatttatttattttgagatggagtcttgctctgtcacccaggctggagtacagtggtgcgaccttggctcactgcagcctctgcctcctgggttcaagcgattctcctgcctcagcctcccccatagctggggactacaggcgcacaccaccacacctggctactttttgtattttttggtggagacggagtttcaccatgttgcccaggctggtctcgaactcctgacctcaagtgattcgcctgccttggcctcccagagtgctgggattaaaggcgtgagccactgcgcccagccaaggtgttattattctactaagggcacctctatccccactgaattattgctctaaaacatctggttgcccagtgagttatgatggggtctgatgtaaacatcaggccatggttgtgcttcagtagggtccgctagagaggagccactggatgggctattcatagggtctcatgtaagcatgggcctctcacagagttattttaggacctaattgtaaatgtcagaccactgagtagaatgttacaggctcccagccaggcacggtggcatatgactttaatcacagcactttgggaggctggggcgggtggatcacttgagggcaggagttcgagatcagcctggccaacaaggtgaaactccgtctctactaaaacacaaaaaattagccgggtttggtggcaggcacctgtaatctcagctactcaggaacctgaggcaggagaatcgcttgaacccaggaggcagaggttgcagtgagctgagatcatgccattgcactccagcctgggcaacagagtgagactccctctcaaataaataaataaataaataaataaaagtaacaagctgtcttagaaacatcaggccttccagtgaggtatagtcaggtttgtggtaaacaccattggcatttattaggcgcactgtgagctccaggccctgggctggtcagaggttggatgggtctgggcagggtatcctcaagtgaaaatctaacctgtctaacctgcaggagctggatgtggtcaagtggtcatcgctacctactctaagcaaaagcctgggctggggcatgaggaggtcttggcttcaggaccaccgaaactcctttctctctggccccaaatctagagaatacttgggggcaatttagcctcccatctttcttttcttttcttttcttttttttttttttttttgagatggagttttgctcttattgcccaggctggagtgcaatggcctgacctcggctcactgcaacctccgcctcccgggttcaagtgattatcttgcctcagcctcccgagtagctgggattacaggtgtacgccaccactcccagctaattttttgtatttttagtagagatgaggtttcaccatgttgaccaggatggtctcaaattcctgaccttaagtgatccacctgcctcagccttgcaaagggctgggattacaggtgtgagccaccgcgcctggccttttttttttttgccttttttttttttttttttttttttttgagacagagtcattctctgtcgcccaggctggagtgcaatggtgcgactttggctcactgcaacctctgcctcccaggttcaaacgattcttgtgcctcagcctccagagtagctgggattacaggtgcacaccaccatgcccgtctaatttttgtatttttagtagagtcttcgtttcaccatgttggccagactggtctcgaactcctgacctcaggtgatccgcccgcctcagcttcccaaactgctgggattataggcgtgagccactgcgcccagcctagcctcccatctttcttctcaattcctcaggtctgcttgcgtagggatttttcttaacttaagggtcagctttgttcgggcaggaggcatggagggccctgaagggctgggccggaagcaagcctgtctagccatgcttctccatttcttggacacctaccaggggctgcttcaagaggaagagggggccggccacatcatcaaggtgggcctgggggaagagaaggtgggtaaacaggctattagctctggaagggggcccctgtgaaggagccatacttctcattctgggtacctggaaggaagagatgccagggggccttagcttatatggctctcctgtgcttaaaggtatggagaccttgcccggcccctgcagagagtagcccttggaatgagaccccttccttcaccttctttgtcctcctctctccaggatctatacctgctaattatgaaggacgagtccctttaccagggcctccgagaggacactctgaggctgcaccagctggtggagacggtggaactaaagtgagggggagtggggcaggggcgggaacaggaaagtggtcccctgcgttcctctactacaggggctgcctctggcctattggctgcaatatggatttgcttgtttgtttgtttgttttgagacagagtctcactttgtcgcctaggctggagagcagtggtgcgatctcggctcacagcaacctccacctcttgggttgaagtgattctcatgcctcagcctcctgagtagctgggattacaggggtgcaccatgcccagctaatttttgtacttttagtagagatgggtttcaccatgttggccaggctgttcttgaactcctggcctcaagtgatctgcctgcctcagcctcccaaagtgctgggattacaggtgtgagccactgtgtctggcttccaatatggttttatttcagctcctttctctcactgaagggtggcacaaagcactgtctccagtcacttttttgtccattctcccattcatttgtctgataatccagtggtgtactggtaaatatttaacaaccagtgctgcaggagaaagagccctgatttgtagcttttgctgattcctacagtgtaaactctgtcaccatggctgatttcaagctaccaatgtgacaacactgaaagaggagttgggaagagacatgcagcacaggctgttatgtagtatctccaccatacagtagatgtagtaaaaggtagtaaaatggctgggcaaggtggcttatgcctgtaatcccagcactttgggaggtcaagatgggtggagcacttaaggtcaggagttcaagaccagcctggctaacattgtgaaaccctgtctccactacaaaaaaaaaaaaaaaaaaaaaggctgtgtgccaaggcaggcagatcatgaggtcaggagtttgagagcagcccggccaatatggtgaaaccctgtctctactaaaaatacaaaaattagctgggcgtggtagggcgctcctgtagtcccagctacttgggagggtgaggcagaagaattgcttgaatccaggaggtggaggttgcagtgagctgagatcatgccactgcactccagcctgggcgacagagtgagattctgtctcaaaaaaaaaaaaaaaaaaaagaaaagaaaaattagctgggggtggtggtacgtgcctgtagtcccagctactcaggaggctgaggcaggagaattgcttgaacccaggagatggaggttgcagtgagctgaaatcaccttactgcactacagcctgggtgacagagcgagactccgtctctaaagaaaaaaaaaaaggccgggtgcggtggctcacgcctgtaatcccagcactttgggaggctgaggcaggcagatcatgagaggcagatcatgagatcaggagttcgagaccagcctgaccaacatggtgaaaccccatctctactaaaaatacaaaaattagccaggcatggtggcacatgcctgtaatcccagctactcaagaggctgaggcaggagaatgtcttgaatccaggaggcagaggttgtagtgagccaagattgcatcactgcattccagcctgggtgacagagtggactccgtctcaaaaaaaaaaaaaaggccgggcgcggtggctcacgcctgtaatcccagcactttgggaggccgaggcgggtggatcatgaggtcaggagatcgagaccatcctggctaacaaggtgaaaccccgtctctactaaaaatacaaaaaattagccgggcgcggtggcgggcgcctgcagtcccagctactcgggaggctgaggcaggagaatggcgtgaacccgggaagcggagtttgcagtgagccgagattgcgccactgcagtccgcagtccggcctgggcgacagagcgagactccgtctcaaaaaaaaaaaaaaaaaaaaaaaaaaaaaaaaaaagaggtgggctgggtgtggtggctcatgcctgtaatcccagcactttgggaggccgaggcaggcagaatgaggtcaagagatcgagaccatcctggccaacacggtgaaaccctgtctgtactaaaaatacaaaaattagccgggcgtggtggtacacacctgtaatcccagctacacgggaggctgaggcaggagaattgcttgaatccaggaggtggaggttacagtgagccgagattgcagcactgcacgccagcctgacaacagagcaagactctgtctcaaaaaaaaaaaaaaaaaagtagtgaaaacaggaaggaaactgtttttttggtaacaacttatttgattataaattttatgtattatttattaatttgtattattattttttaatagagacggtttcattatgttgtccaggctgggctccagcaatcctcccaccttggcctcccagagtgttgggattctaggtgtaagccaccacacctggcctgactataagtttataaaacatatatatttatatatggagatatatttgtttatttatattttaatggctctttaaaaaacagttggtaaaattccccagaacttaacagtatgctcttgtgagccagtgtgaaccagcttcaggacaccactgtatccatccatccatgaatccattctgcccttttagtttctctcttctcttgtccccaccaccacaacccttagggaggcctcagcttgtggtctagcatccttctctgccttctctgtgctgacactagagagatctttcatgctcctgttccaaaggcatccctgctccccatgcttccaagagaaagtgaaacatcccagcattcaatacccttccctttctgccttctgctgatccttcccatctcatctcctacatcccctccatccatgacacctcaactcctgcgctctcgaacttcccatggtcggttatattgtccaccccagaatgccctcctcccaccatgttttcttttttttttgagacagagcctggctctgtcgcccaggctggagtgcagtggtgtgatctcggctcactgcaagctctacctcccaggttcacaccattctcctgcctcagccttctgagtagctgggactacaggcgcctgccaccacgcccggctaattttttatattttttttagtagagacggggtttcatcgtgttagccaggatggtctagatctcctgacctcgtgatccgcccgccttggcctcccaaagtgctgagattacaggcgtgagccaccgcgcctggccttttttttttttttttttttttgagatggagtcttgctctgttgccaggctggagtgcatggcgtgatctcaactcactgcaacctccccctcccgggttcaagcgattctcctgcctcagcctcccaagtagctgggattacaggtgcacgccactacgcctggctaatttttgtgtttttagtagagacggggtttcaccatgttggccaggctggtcttgaactcctggcctcaagtgatctgcccacctcagcttcccaaagtgctgggattacaggtgtgagccactgcacctggcctccacctccttctcttcctgctttcctccaaggcccaggtcaaatgccatcttctcaatgaaaacttcccagatcttccttttaggaatagctttcttcttcccccacaccagcataactctcctggtacctttgttatattatcaacacctcctgcctggtattagaagtagctgtatgcctgtctatctccttcctagactgtgaagttcttttcagcaaaattcagcaaacagctgctgacctactacctaccatgtgtcaagcagtgtgttaggccctggtggatgaaaagatactcagtaagaaccaaatcccagtcctcaagagctctcaatctcatagaagagataagaggtgaacataaacattatcccaatgttctatagtagttgagagaagaaagtgaccttcctggtgggtggggtggatcagagaagaattcatggaagaggtggcatttgattagggttacttggataattatcccatactgctcattgtcctctcttctgacccccttaaccacctgaaattgctgctggtgcatccttgacccaattctgatattcttgcttgatgttgcctgcttggtgttggttgtccatatgcctggcagggcgtgctgatgcccagctgtgtccatgccaggattccagaggagaaccagccacccagcaagcaggtgaagccactcttccgccacttccgccggatagactcctgtctgcagacccgggtggccttccggggctctgatgagagtgagtgtgggcattaggaggggcagggtgtcctgagtggctcagggggacatatctctgggtcttgagcaccctcagtggcatctccctgggtggtagaaccagcccctttcacaggaccttcttcagaggccagcctctggtggggaatagaggcaccctggaggagactgtgccagctgctgccactctgccctctgttgaaagccattttcctgtttccgtccagtcttctgccgtgtatacatgcctgaccactcttatgtgaccatacgcagccgcctttcagcatctgtgcaggacattctgggctctgtgacggagaaacttcaatattcagaggagcccgcggggcgtgaggattccctcatcctggtagctgtgtcctcctctggaggtgagggtcaggaagaactgggctgatgctccgagaggagaaactcacaagctcagggctctgggggaggggtagagactgaattctaggcccttgctactcaaagtatggtcccgggacaagcctcatgtgcatcgcctgggaacttgttaggatgcagcatcttgctgggtgcagtggtgcaaacctgcagtcccagctactcaggaggctgaggcaggaggattgcttgagcccaggaatccaaggtagtacattatgattgcacctgtgaataggcactgcgccctatcctgggcaacataacaagactctgtctctaaaagagatgcagcatctgcgaccccaccccgacctgctggtcttgttcaaatcagcatttggacaggaccccccaggggactcctatgcctactaaagtttgggaggcactagctgggcatggtggtgtgcacctgtaatcccagctacttgggaggctgaggcaggagaatcacttgaaccgcggaggcggaggttgcagtgccgagatcaagacactgtgctccagtctgggcaacaagagcgaaactccgtctcaaaaaaaaaaaaaaagtttgggaggcactggtctaggactcaggttctgatctgagtgctgcccctcactcacctatggattgtattctgatcctttaacctccctgtgtatgtaaggatgccacatttcacaggctaaagacacaggatgagtgggaaggcagaaagccagcaatgtcactgaagctttgttttcctctacagtaggaaaaaatttcagccttcccagtgtcacaaggacaacagagtaagagaaaagctgtgaaagaaagggagtagaaaaaaagttataaatgcaaaagaaataatcatttgacaaattccagataaatatggcataaactagtgataagatgagttccattagtctagaatgtgtcagtgtggggtgaggagtttttggataggacagtgtcagtgtgggatgtgtgagggtgcaggcggcaggggccgaggatgagcagctctttctcctgcagagaaggtccttctccagcccactgaggactgtgttttcaccgcactgggcatcaacagccacctgtttgcctgtactcgggacagctatgaggctctggtaagaacttcccaaggccttgactggaatggagggctgaggagggctgtgagcaatccctcaccctgccaccaggagcccagcccctatgcccctgcctgccaccaggtgcccctccccgaggagatccaggtctcccctggagacacagagatccaccgagtggagcctgaggacgttgccaaccacctaactgccttccactgggagctgttccgatgtgtgcatgaggtggggaccgaggctggtgctatgctggggggctggagggagaaatgtgccattgggagacggtgttcgcagcacaacgtcctggttccaaggctcacttgcagcaagcccttgggcaacgcatggccgtaacctttgttcccccatctgaaaaaaatcgcaaagagagagaccccagagcacagtggctcagggcccaagtgctgtttacacagaacctgacccaggatttctatttttaaaatattcactattaaagaaataaaataaggcagagacaataatgcctagcagatggttgtcttgaggatgtcagccgtgagcgaatgcctggcacctagtaagtgctcagtagctggtgaaatattattaatgctggttgttttctttttccgcatctttgccgcctcctgtcctttctatttttctattttccaccccttccgcccccgccctcctgcctttcgctcctcatcgccttgcactgccatcttcccacccactcccctcaccccctggcgccctggccgcccctccgctgccgtgggtgcagctggagttcgtggactacgtgttccacggggagcgcggccgccgggagacggccaacttggagctgctgctgcagcgctgcagcgaggtcacgcactgggtggccaccgaagtgctgctctgcgaggccccgggcaagcgcgcgcagctgctcaagaagttcatcaagatcgcggccctgtgagtgcggccgtcggcgggatggggggccggaggccggaggcccgcgccgccgcccgcccctgaccccgcctcccacccccgcagctgcaagcagaaccaggacctgctgtctttctacgccgtggtcatggggctggacaacgccgctgtcagccgccttcgactcacctgggaggtgatgagacccctcccgttcctacctgggaatctgggcatcccgggctccccgaagtgcgtcctcccgggacggccgccggcctggagggagtctttgcgccagttggagggaggcgccctcttctggcatacgcaaccccagggcgcacagcttggctaatggaccctgtctttgtgcaaattagtgaaaagcccggatcccgcctgagtcacggcaggcagcccttggccaggtcaggtcgcagacttggctgtgggagttgggctgattttcatccacactcagtgggggcatctttatacaaagcacctgcataagacagacctggccttccccagaataatgaattcctctgggctgtttcaagcctctagacttagccaaggcctgacttcatttccccacccaccagcttcccagccccctacaagccatgcaggcccttttgccctccaacagggagaattaatccgaggctcccatgtaacccaaggagctccactctgatatcccttctccttccttcaaactctgcagaagctgccagggaaattcaagaacttgtttcgcaaatttgagaacctgacggtgagtgggtttggctctttcttctgctcttggactgagagcccagaaaccctctgttcccataaacccccttcctcaagctttcctttcaaggtgtttagtgtatgggaccccccaccctccttaccatgctggagggtgaggttggaaggattgcgcccctgtttttcttgaaggaaagggggagtagtcaggtccctccccaccacaccattagaaagcccccagcacccctatctgatcaggaatgtatacaaggcagggggtgagggaggaagctgaggacatctttgggatgcattggccagtctgtcccttgatctctctcctgtggaatactaggacccctgcaggaaccacaaaagctaccgagaagtgatctccaaaatgaagccccctgtgattcccttcgtgcctctgatcctcaaaggtgagagagttactcccaagctgtgccgcttccacccatgcttcccttctcctatgccctgcttctgacttccagctccctctcgactcagccctgagtacccacctggagaggagccccccaccacagacggagtgggttctggggaagagcggggtcctcgggtgcagtggcccctttcgaactcctctcttatcctttcctcacattggattctctccacatcccctagacctgactttcctgcacgaagggagtaagacccttgtagatggtttggtgaacatcgagaagctggtgagtgagtggcactgcaaacccctagtcccacaagtggggggcttgcatcctctccctctctcatcacctcccaaaaatagcagccttcctccaagtgcccagcttgcctaacagactcttgactgtctccctggtggcatcactgtggcaacccacccacaggtggcagagctgacaggcagcttgggggcaacttcacctccccctcacatggcactctgttacacccactcctttggtccttcagagaccctccagaattggagactggagggagtaaagcagagtgggagaatggcggagggggagcataagagggggagcctctttctgtgcccctttcaaggctcattccttgtcatctcccagcattcagtggccgaaaaagtgaggacaatccgcaaataccggagccggcccctttgtgagtacccagggtactgagagcagtacagatagagctttgactgaacgggagggttcaggggagaactccctgtccagatgtgtatttccatacacttgctggttccccattctctccttgcctctgcagaggccttcctgcccaacatctgtctcagtccacagcctgatcttctgcccggtgtgtgtgtagaggaagaagggaagctgggaacctgactgcctctccctctttacccactaggcctggacatggaggcatcccccaatcacctgcagaccaaggcctatgtgcgccagtttcaggtcatcgacaaccagaacctcctcttcgagctctcctacaagctggaggcaaacagtcagtgagagtggaggctccagtcagacccgccagatccttgggcacctggcactcaagcactttgcacgatgtctcaaccaacatctgacatctttcccgtggagcaacttcctgctccacgggaaagaggtcgatggatttacccctggacccataagtctgttcatcctgctgaagtcccctccccattgctccttcaagccaaaactacactttgctggttcctgtcccctctgagaaaggggatagaaagctccttcctctatgtcctcccatcgagatctgttctggggatggagcttccaacttcctcttgcagcaggaaagaatgctgctcacccttctgtcttgcagagtgggattgtgggagggattggcagccttcttctccaccacctgtccagcttcttcctggtcagggctgggacccccaggaatattatgttgccgtgtgtgtgtgtgtgtgtgtgtgtgtgtgtgtgtgtgtgtgtgtgtgtgtgtgtgtgtcttcttttagggagcaggagtgcatctggtaattgagggtggatgttgtgtgtgctggggaggggtccttctgtttggtgctacccttgtctactctgcccctggatggtgcggggtgctttctccacccccacactccctgctcagctcctcgtgctgccctgcatgcccaggcttgtgagccaagctgctttttggggcagggagtagcagcaggtgggaggggttacccatcagcccttgcaagtcccccactcaggcctctggaaggtccagggatgggctctgatgagagggtaaaagatgctcagggaaacacaggcctcagctgcctagaggaccctccccctgccttgcagtgggctcgggtagagcagtatcaggagctagggttgtctgctgcccacactcctgctttttgggatatctaactgctaaggagggagttgacatcccccttctggctcatgtgtctgacaccaacaacatggtctctgtccctctctctttgactctccctttgtcctccccatagagctggggtggggtggatccctatacctggggcaggcagccccaaagtgggggagggggatggcagagactgtaaaggcgccactggactctggcaaggcctttattacctttactcccctccctctcccatcaccagcctcaaggcctgaggggtgcaggggctcctggcagctactgggtgaggtttcctggcacagactcacccttctttctggcaccacctctttcccttttgaagagacagcaacagccgtagcaaaagcagctgctgctcctgctatgagggtgtatatattttttacccaaagctctggaattgtacatttattttttaaaactcaaagagggaaagagccttgtatcatatgtgaacattgtatcataggtaatgttgtacagacccttttatacagtgatctgtcttgttcctgcagcaaaaatcctctatggacataggaggtgctgtgtcccatgccctcttgccctgacagtgtcccatgggcccccttctgctccctgccccctccctgctactgctgatgcactctcctctccctgcagcccctggcttcccagccttcctcctgaccccttccaacagccttggaactccagctgccaccaccctctgggtcggacactgggacccactggcccagtcttggctgctgcttacccctagccttgatgcctgcccagggacccccagccccctcccgttgccctgcagctttaacagagtgaaccatgtgtattgtacaggcgcggttgtcattgcagaaaccgctgggtggagaagaagccgataaagtctatgaatcaacctgcctgttgttctccattctgttttctttgaggctgtggaagtgctgagggaggggagaggggatggccgcccagtgctgtcaggagcagggctgttctggagtgactttgaaaatgtgggtggcggggtacagtggctcatgcttgtaatcccagcactttgggaggccgaggcgggcagatcacctgagggcgggagttcgagaccagcctggccaacatggtgaaaccctgtctctactaaaaatacaaaaattagccaggtgtggtggtgcatgcctgtaatcccagctacttgggaggctgagtcaggagagtagcttgaactcaggaggcggaggttgcaaggcgcagtggctctccagcctgggcaacagagcaagactctgccaaaaaagaaaatgtggatgagaggaaaagatgccaacctcacaagacatgtcacataatgcctggaactcagaagaggggatgggatgttttcgttcatacatgttccaggtggcataaatatgagatcacatttaattctaatgctaaggtagaagattgaggcacagcagtcccagaataattactagtgagggcactggtcccctaacccaggtctgtcccctgaagacagcatgtactgttcacacaaccaatatttaccagttctactaagttttgttttgttttgttttttttgagacggagtcttgctctgttgcccaggctggagtgcagtggcgtgatgtctgctcactgcaagctctgcctcccaggttcatgccattctcctgcctcagcctcccaagtagctgggactacaggtgcccaccaccatgccgggctaattttttttttaatatttttagtagagatgaggtttcactgtgttagccaggatggtctggatctcctgacctcgtgatctgcccacctcggcctcccaaagtgctgggattacaggcttgagccactgcgcctggcccaatcctactaagattatagggtgcagagagcctagcgttaggcttaaatgatagcctgagttccaggagacatcatacactcaaatagctatacctgggcccttgataatccccattcacatctgtttctgcctcagtcttctgcatctcagaaaaatgatcctctcatccacccaggttttctctctctgttgcccaagctggagtgcagtggcgtaatcttggctcactgcaacctctgcctcccaggttcaagtgatcctcctgcctcagcctcctgagtagctgggattataggcagaggccaccacacccggctaatttttgtatttttagtagagatggggtttcaccatgttggtcaggttggtctcaaactcctgacctcaagtgatccacccacctcagtcttccaaagtgctgggattacagctgtgagccactgcccagccacctacccaagttttcaaggcaaaaatacaggactcaccattggtgcctctttctcccacccttcattcatctcagccagtcccatcggctacaattccagagcattttctgagtgatccacttctgtatgactcccctatgaccatactagtccaaaccaccttcatagcttccctgcatgactactgcagcctcctacctggtctgtcagcttcctctctttgatccacccctacctgccaccagtttgatttccacatggcagccagggtgttctttcagaaacaccaatcacgctgggcatggtggctcaagcccataatcctagcacttcgggaggctgaggcaggaggatcgcttgagcccaggagttcaagaccagcttgggcaacatagtgagaccctgtctctacaaaaaataaaaaattaacgaggctgcagtgagctgcgatagcaccactgtactatagcctgagcaacagagtgagaccctgtttaaaaaaaaaaaaaaaaagaaaggagagcaagggaaggagggagggagggacagagggagggagagagggagggaggaaggaaagaaggaaggaaggaaggaaggaaaaaaacccagtgtctttcaacacatgaatggacaaatgcattggggcatattcttatggtggaatactatatagcaagaaaaaagaacaaattattaatacccacgtgaatgaatctcacagacttaatgttgaataaaggaagccagacacaggctgggtatgttggctcacacctctaatcccagcactttgggggcctgaagtaggagtgagaggtgaagctggctgggcttctgggtcaggtggggacttggagaagttttctgtctagctaaaggattgtaaatgcaccaatcagtgctctgtgtctagctaatcaggtaggggacttggagaacttttctgtctagctaaaggattgtaaaagcaccaatcagcgctgtgtgtctagctaaaggtttgtaaatgcaccaatcagtgctctgtgtctagctaaaggtttgtaaatgcagcaatcagtgctctgtgtctagctaaaggtttgtaaatgcaccaatcagcactctgtaaaaacgaaccaatcagcactctgtaaaacggactaatcagcattctgtaaaatggaccaatcagcgctctgtaaaatggaccaatcagcaggatgtgggtggggccaggccacccgagccagtagcggcaacccactggggtccccttccacgctgtgggagctttgttcttttgctctttgcaataaatcttgctgctgctcactcttttggtccgcactatatgagctgtagcacttaccacaaaggtctgcagcttcactcttgaagccagcgagactacgaacccactgggaggaacaaacaactccagaagcgccacctttaagagctgtaacactcactgctgaaggtctgtggcttcattcctgaagtcagggagaggacgaacccaccagaaggaagaaactggacacatctgaacacctgaaggaacaaactccggacacaccatctttaagagctaacactcaccgtgagggtctgtggcatcattcttgaagcttcattcttgaagtcagcaagactaagaacccactggaaggaaccagttctggacacaggaggatctcttaagcccaggagttcaagaccagcctggccaacatagtgagacccctatctctacaaaaaataaaaaatgtagctgggcatggtgtgtcgcgcctgtaatcccagcactttgggaggttgaggcaggagaatcccttgagtccaggagtttgagaccagctcaggcaacatagggagaccttgtctctacaaaaaaataaaaaaataggccaggtgcggtggctcatgcctgtaatcccagcatttgggaggccgaggtgggtggatcacctgaggtcggaagtttgagaccagctgaccagcatggagaaactgtctccactaaaaatacaaaattagctgggcgtggtggcacatgcctgtaatcccagctactcgggaggctgaggcaggagaatcgcttgaacctgggaggcagaggttgtggtgagctgagagcgtgccattgcactccagcctgggtaacaagagcaaaactccatctcaaaaaaaaaaaaaaggctgggcagggtggctcacgcctgtaatcccaacactttgggaggctgagacctatggatcacgaggtcaggagtgcaagaccagcctggccaagatggtgaaacaccatgtctactaaaaaatacaaaagtgagctgggcatggtggcaggcacctatgtaatcccagctactcagaaggctgaggcagataattgcttgaacccgggaggcagaggttgcagtgagccgagatcgtgctactgcactccagcctgggcgacagagtgagactccgtctcaaaaaaaaaaaaaaaaaaagccatatatggtggtgcattcctgtagtctcagctacttggtaagctggggtgggaggattgcttgagcctgggagctcaaggctgcagtgagcagagatcatgccactgtattccagcatgggcgaaagagggagaccgtgtctcaaaaaaagaaaaaaaaaaagccaagcatagtggtgcatgtgtgtagtcccagctactcaggaggctgaggtggaaggattgtttaagcccaggagttcaaggctgcagagagctatgattgcaccactgtactccagcctgggtgacagagtgagactctttctcttaaaaaaaaaaaagaaaaagaaaaaaaggccgggcacggtggctcacgcctgtaatcccagcactttgggaggccgaggcgggtggatcacgaggttaggagagtgagaccatcttggccaacatggtgaaatcctgtttctactaaaatacaaaaaaattagctgggtgtggtggcgtgcgcctgtaatcccagctacttgggaggctgaggcaggggaatcgcttgaacccgggagggagagtttggagtgagctgagattgcgccactgcactccagcccggcgacagcgacagaacaagactcagtctaaagaaaaaaaaggctgggcgcggtggctcacgcctgtaatcccagcactttgggaggcggaggcgggcggatcacgaggtcaggagatcgagaccatcctggctaccagggtgaaaccccgtctctactaaaaatacaaaaaagtagcccggcgtggtggtgggcgcctgtagtcccagctactccggaggctgaggcaggagaatggcgtgaaaccgggagggggaccttgcagtgagccgagatggtgccactgcactccagcctggacgacagagcgagactccatctcaaaaaaaaaaaaaaatttaggccgggcacggtggctcacacctgtaatcccagcactttgggaggccaacgcgagtggatcacctgagattgggagttcaaggccagcctgaccaagacggagaaaccctgtctctactaaaaacacaaaattaactgggtatggtggcgcatgcctgtaatcccagctactagggaggctgaggcaggagaatcgcttgaacctgggaggcggaggttgtggtgagctgggatggcaccactgcactccagcctgggcaacagagccagactccatctcaaaaaaaaaaaaaaaaagttcaagagcaggctaaattaatctacggggatagaagtaaaaataggctgggcacggtggctcatgcctgtaatcccagcactttgggaggctgaggcgggcgaatcacgaggacaggaaatcgagaccatcctggctaacacggtgaaaccccgtctctactaaaaacacaaaaaaaattagccgggtctggtggcgggcgcctgtagtcccagcaactcgggaggctgaagcaggagaatgacgtgaacccgggaggtggagcttgcagtgagccgagatcatgccactgcactccagcctgggcgacagaacaagactccgtctcaaaaaaaaaaaaaaaaaaagaagtaaaaatagtgcctactcaatagggtaggggaaagtattgaccgtgaaggggcatgaagaagccctgtggggcgatagaaatgttccatatcggccaggcgcggtggctctcgcctgtaatcccagaactctgggaggtcgaggtgcgggaggctgaggcaggagaatcacttgaacccgggaggtggaggttgcagtgagctgaggttgcactgagctgagatcgggccactgcactccagcctgggcaacagagtgaggaataaataaataaataaataaaagaaatgttccatatcgtgacctgggggtgggtatacaagtgtgtctatctggcttgttgagttggtcatgtaaaatttgttaagtgttaccgtagctacattacaccataaagcaattcagattctgacagtccactgtttttaataacagatttaaaataaaaaattctcccttcctggccaggcatggtggctcacacctataatcccaggactttgggaggctgaggcaggcagatcacttgaggtcaggagttcaagaccagcctagccaacatggtgaaagcctgcctctactaaaaatacaaaaattagttgggtgtggtggcggtcacctgtagtcccagatactcgggaggctgaggcaggagaatcagttgaacccaggaggcggaggttgcagtgagccgagatcccaacactgcactccagcctgggtgacagagcgagactctgtctcaaaaaataaataaataaggtgtcttcatgaggtgtgctgcgtgcagtgaagaatttaggcagtgccctttgaatccactaggtgtcaccaccaagattgttttctcaacctgcctggggatgagggaggaggctacataacccagaggaggatagtgcctttcttggggtaatcttgaatccttctgagagggtctatccccagatataagtcatatttgaccggaagaacttgtttcttcagtctctccctatgagctctttcatctttagcgtttaaacccttttaagtctccatttttaaaaacactttccttctgtagtcctagtgggaggatcgcttaagcctagaagtttgaggctgcagtgagctatgatcacaccactgcacgccagcctgggaaacagaccaagaacatgtctcaaaaataaataggccgtgtgcagtggctcacgcctgtaatcccagcactttgggaggctgaggcaggaggattgcttgagctcaggagtttgagaccagcctgggcaacatagtgagacccttacctctactaaaaaaaaaaaaaaaaaagccaggtgtagtggcatatgcctgtaatcccagctactcggaaggctgaggcatgagaattgcttgaacccaggaggtggaggttgcagtgtgtggagattgagccattgcactccagcctaggtgacaaagtgagactgtctaaaaaaaaaaaaaaagaatcctaatatttggggaaaaaaagaaaaaacattatgtttaaatgtgttgtgtaatatttcaatcatacaaaaagtttaaagactaatataatgagcacttgagtctccacctcccagcttaggaaatgaaaacttggccgggtgccgtggctcacttctgtaatcccagcactttgggaggccgaggtgggcagatcatgaggtcaggagatcgagaccatcctggctaatacagtgaaaccccgtctctactaaaaacacaaaaaaattagccaggtgtgtagtcccagctactcgggaggctgaggcaggagaatcacttgaacctgggaggcggaggttgcagcgagctaagctcgtgctactgtactccagcctgggcaacagagagagactccgtctgaaaaaaaaaaaaagaaaagaaaaaaagaaaaagaaatgaaaccctaccctccagctgaacctggtacctgtccccagttgcatcctctttctttctttccagagacaaccaccctcataagtatggtattgtgacacaaagtagcaaacctaagtagccacttttgttaattctgcttgccagcagaatttcaccaattcccttggcagcagaatttcacaaagcccctgagtcagtgtgagcacagtccccagcccagaagaatgccctgaaaatgataagcaggatagggcacagcttcctgtgtctcttgccaaagtcactgcaatttccgaaaagataagttcagtgatcctggcctttgcttcttcctgtacgtaaaacaatgtgacgaattaatgattatgcctctgtaatctataaccagatgtatcttcgcacccatactttgatgagattttgctctaatgtaacttctcagcatatatttaatataacttctgagcacatacagaaccgccaccacctgtgtattcactactccggagcagtctaactgaatctctctgaaagtctcctcccaggttgggcgcaatggctcatgcctgtaatcccaacactttgaaggctgaagcaggtggatcacctgagatcaggagtttgagaccagcctggccaacatggtgaaacgtcatctctattaaaaatacaaaaaaaaaaaaaatggccgggcgtggtggctcacgcctgtaatcccagcactttgggaggcctgaggcgggcggatcacaaggtcaagagattgagaccatcttggccaacatggtgaaactccatctctactaaaaatagaaaaattagcagggcgtggtggcgcatgcctgtaatcccagctactcgggaggctgaggcaggagaatcacttgaagcagggagtcggaggttgcagtgagctgagatcgtgccactgcactccagcctggcagcagaacgagactccgtctcaaaaagaaaaaaaaaatagctgggcgtggtgatgggagcctgtaatcccagctacttgggaggctgaggcaggagaatcgctttaacctgggaggcggaggttgcagtgagccaaggtcatgccattgcactccagcctgggcaacaagagcgagactctgtctcaaaaaaaaaagaaagaaagaaagaaagtctcctcccagattgcaatcctcagtgaaactctgcataaaacttattctttaaatgcttggtttttctctctctctctctctctgtctctttccttcttcttcttctttttttttttttggggggggttcaggatgttactctgtcacccaggctagagtgcagtggtgcaatcacagctcactgcaaccttgacctcctggactcaagtgatcctcccacctcagcctcacgagtagctgggaccacaggcatgcaccaccatactcggctagtttttttattgtttgtagagacagaattttgctacgttgcccaggctggtctcaaactcctgggctcaagggatcttcccatctcagagtctcaaagtgctggggttacaggtgtgagccactgttcccagccaaaagcttgatttttctttcatcaacagtataacattcctgtaaacttgtactacatttgtatacatctccaaacagtgtgttgcaattttgaggataacagttttattgagatgtagttcacatactatgtaattaacctaaaatgtacaaatcaatggtttttagtatattcaccaagctgtgtaaccatcaccacagttaattttgttttttttgttttttccgagacagagcctcgctctgttgctcaggctggagtgaaatggcacggtctcggctcactgcaacctccacctcccaggttcaagcaattctcctgcctcagcctcccgagtagctgggattacaggcggccgccaccatgcctggctaatttttgtatttttagtagagatgggggtttcaccatgttggccaggctggtctcgaactgctgacctcgtgatccacctgccttggcctcccaaagtgctgggattacaggcgtgagccaccgcacctggctaattttagatcattttcattaccccccaaaagaaaccccctgtacaagactgttcatagcaacattatttgtagtagcccaaagtagataaactaaaatgtggtatattcataagatggaatactattccatcataaaaaagaatgtatttgtccattctcacactcctataaagaactacctgaggccaggtgcggtggctcacacctgtaatcccagcactttgggaggccgaggcaggtggatcacctgaggtcaggagttcaagaccagcctgaccaacatggtgaaaccccgtctctactaaaaatacaaaaaaattagctgggcgtggtggcaggtgcctctaatcccagctacttgggaggctgagggaggagaatcgtttcaacccaggaggcagaggttgcagtgagccagattgtgacactgcacaccagcctgggcaacaagagcaaaactccatcacacacatacacacacacacaaaaactacctgagactgggtaatttataaagaaaagaggtttagtggctgggtgcggtggctcacgcctgtaatcccaacactttgggaggccaaggtgggcagatcacgaggtcaggagattgagaccatcctggctaacatggtgaaaccccgtctctactaaaaatacaaaaaaattagctgggcatggtggtgggcgcctgtagtactagctactcgggaggctgaggcaggagaatggtatgaacccgggaggtggagcttgcagtgagccaagattgcgccactgcactccagcttgggcaacagagccaggctccgtctcaaaaaaaaaaaaaaaaaaaaaagaaagaaagaaagaaagaaaagaggtttaggccaggcacggtggttcattcctgtaatcgctacactttgggatgccaaggctagcagatcacgaggtcaggcaatcaagaccatcctggccaacatgatgaaacccagtctctactaaaaatacaaaaaattagctgggtgtggtggcacgcacctgtagtcccacctactcaggaggctgaggcaggagaatcacttgaacccaggaggcgagggttgcagtgagccgagatcatgccattgcactgcagcctggacaacagagcgagactccatctaaaaaaaaataagaggtttaattgactcacagttccacaggacgtacatgaggcacggctggggaggcctcaggaaacttacaattatggcagaaagggaaaggggaagcaagtaatcttcacatgagcaggaaagagagagcagaaggggaggtgacacacacttttatttatttatttatttatttattttgagactcactctgtcgcccaggctggagtacagtgacatgatctcagctcactgcaatctctgccttccgggttcaagcgattctcctgcctcagcctcctgagtagctgggattacaggcatgcatcaccatgcctggctaatttttgtatttttggtagagaaaagatttcaccatgttggccaggttggtcttgaacccctgacctcaggtgatccacccgcgttggcctcccaaatgctgggattacaggcgtgagccatgtgcctggccagtgccacacacttttaaacaaccagatctcatgagaactcattcattatcacggaatcagcaagggggaaatctgctcccatgatccagtcacctcctgccaggtccctcctaacattggaaattacaatttgacatgagatttgggtggggacacaaagtcaaaccatagcaaggaatgaagtactgatatatactacaacatggatgaaccttgaaaaaactgtgctaaaaaaccagacacaaaaggcctcatattgtatgattccatttatatgaaatgtccagcatagacaaatccatagagacagaaagtagatagtttctggttgccatgggctggggtgagagcagaatggggagaggctactaatgggtatggagtttctttttgggtgatgaaaatgttttggaattagatagtggtgatggctgtacaacattgtaaatatactatatactcacttggatgctttaaagtggttacaatggtgagttttatgttatgtgaattttatttgcttggcttctagactcatcacaccagtctctgcctccatcattacaaggcattctcctctgtgtgtctctctgtgtcctctcttcttctttctttcttttttttttgagatggagtctcactcttgtcacccaggctggagtgcagtggcatgatcttggctcactgccacctccgcttcccaggttcaagtgattatactgcctcagcctcctgaatagctgggattacagaggcccgccacgacgcccggctaattttttgtatttttagtagagatggggtttcactgtggtctcgatctcctgacctcgtgatccgcccgcctcggcctcccaaactgctgggactacaggcgtgagccactgcgcccagcctctcttttcttttctttcttttttttttttttttgagacagagtcttcctgtgtcacccaggctggagtgcggtgtcacgatctcagctcactgcagcctctgcctctgcatcctggactcaagtgatcctcccacctcaacttactgagtagctgggaccacaggcgcgcaccaccaagcacagctaatttttctggatttttagtagagacggggtttttatcgtgttgcccaggctcgtctcaaactcttggcctcaagctatctgcctgcctcggtcggccacacaaagtgctggaattacaggtgtgagccaccacgcttggccaattgaatgtttttagattttatataaatattatcatactggatgtggtgttcagcaactccccatccacaacactctgcctgtgaggctcatccaggtcagcatatattactggtttgtttggttttgctgttctgtgtttctctttgattctcaacccagtgcatctggctttctctgtcatcactcacataatctgcctgggtcaagagcaccgatgactcccatgttaccaaatccaagaacacttattttcctattgctggcatttgatatttctgaccattcttccttctggaacacttatcgctgcttccaggatgctacgttctcaggatttccctgtcttctctttctcagtcttcctcactggcctctccctcagcctggtccttgtatgtggagtgccccagctccctcttgagccctttttttttccttccataatcctgggcttagatttcatcgtcatatttgtgtttgggaatctactgctgcataacaaacagttccaaatttagtagcttaaaaatgacaactttgttttattttattttactttttatttttttttgagacagagtcttgctctgtcgcccaggctggagtgcggtggcatgatcttggctcactgcaacctccgcctcctgggttcaagtgattcttgtgcctcagtctcccaaatagttgggattacaggcatgagccaccacgcccagctaatttttgtatttttagtagagacagggtttcactatgttgcccaggctggttttgaactcctgacctcaggtgatctacctgcctcagcgtcccaaagtgctaggattacaggtgtgagccactgcacccagcctaaaaacagcaaccattttataacttctcatgatcttccgggctgatgggagcttagctggatagttcttctggtctcacttgaggtctctcttgctgcagtcagaaggccactggagggccaggtgcagtggcttacgcctgtaatcccagcactttgggaggccgaggcgggcggatcacctgaggtcaggagtttgagaccagcctggccagtgtggcaaaaccccatctctactaagcatacaaaaattagtcgggcatggtggctggtgcctgtaatcccagcttctcaggaggctgaggcagaagaatcgcttgaactcgggaggcggagatggcagtgggccgagatcgtgccactgcactccagcctgacaaagcgagactcagtctcaaaaaaaaaaaaaaaaaaaaaaaaaaaagccactggagctagctaggatgctagctcacatgtcctgagccctggtgggaacaaagggaccacaaggatggctggacttttctctccatgtccaggcttctccctccaggtggtctctgcagcagagtacctgatttctcacatgggagatgactcccaaaagcaaaaaagtagaagctgtcaagtctttttacaatttagtcctgaacctggtacagcttcaattctgctgcattccactggttaagagcagtcacaggccagccccacattcaataaataccaggactcctggttcactgggagccatctttggaaattagctaccacagtttatgagtcccaaattcctaggattactctcctcagtttcagacccaaatatccagtgatctaaggaatctctcttcttggtcattccactgtgctattcgggctcctccagtgccccagcccctcctcttgctctgcaactgtttccagctaagtgttaacatcacctccaagcaggagttcaagtcagaaatttagcaatcatatttgggtcctcccactctttggtcccgcattccttttcttaaatatctctagacttacccctctccatctctgctgctgatactctaatcacaaacatggctaagattggtgagtggtttccatgtgtgtaaacacttgggatgcattccatttgggcttatctgctcattttgcagatgaggaacctgagactggtagaggttggataatttgcccaaagtctcaccttattcaagagtggggagaactaagaggccttaggttctgcagacagacaggcagccctgacttcagaggctttgtgccaagccagtgtccagcagccactcagtgtagacaactgtcatctcccagttggcctttcctagcagtctcccaactggtgttccggcctccaacctggccccatctaatccatcctccttgctgcagtcagaggtatctttctagaataccaagagcatcttggtcttctctgcttaagcctttcaatggtttcccttgagataaaatctaacttttctcaatacataattaagtccttcataaattggcccctgtcagcttgacagtatagcgtgaggcagtagctcttcatgggagcattttggaaatgtcgttgtccatctatcacaatggtaagaacgtgctattggcatttgatggtcagtggtcagggatactggagtgctataatacaagggacacccaaccaagaattatccttggtttccacaaaactctttttttttttttccagagtcttgctctgtcaccccagcttgagtgcagtgacacaattttggctcactgcaagctctgcctcacaggttcaagctattctcctgcctcggcctcccaagtagctggacttataggtgctcgccaccacgtctggctaattttttttttttaatatatatatagtttctgagacagaggctcgctcttgttgtccaggctggagtgcagtggcacaatcttggctcaccccaacctctgcctcctgggttcaagccattcttatgcctcagcctccagagtagctgtgattacaggcacctgccatcatgcccggttaatttttgtatttttagtagagatggggttttaccacattggccaggctggtctggaactcctggtcacgagtgagccacccacctcagcctcccaaagtgctgggattacaggcgtgagtgggtcccatctttacggtgggggaatctcctattaaattcccctttgaagactgagcacggtggctcatgcctgtaatcccaacactttgggaggctgaggcgggaagatcatgaagtgaagagattgagacaatcctggccaacatggtgaaaccccgtctctactaaaaatacaaaaaattagctgggcgtgctggcacgcgcctgtagtcccagcaacttgggaggctgaggcaggagaattgcttgaacccaggaggcagagcttgcagtgagccgagactgcacctctgtactccagcctggtgatagagcaagactccatctcaaaaaaaaaaaaaaaattcccctctggagaggttttggggtgtttccccttcccatgagacaataacaaaagttcaagttcaccaggttagtcaagtgccctcagagtaaaagcttgtttcagtgttccactgacctctctctgcatcccctgccttattttattttgccctgaaaattccttactttttcagcagctcatcaaagcatttaaaatttaaaaaaatttaggctgggtgtggtggctcatgcctgtaatcccagctactcgggaggctgaggcaggagaatcgcttgaacccaggaggcagaggttgtggtgagccaagatcacgccattacattccagcttgggcaacacaatgagactccatttcaaaaaaaaaaaaaaattaggccaggcgcggtggctcatgcttgtaatcccagcactttgggaggccaaggtggcagatcatgaagtcaggagattgagaccatcctagctaacatggtgaaaccctatctctactaaaaatacaaaaaattagccaggcgtggtggcgcatacctgtaatcccagctactcgggaggctaaggcaagagaatcgcttgaacccaggaggcggaggttgcagtgagctgagattctgccactgcactctagcctgggcgagagcgtgaaattccgtctaaaaaaaaatttaaaaaaataataatttttatctgagatttttagttgttttttggggagacagagtcttccaggtacttggcctggcagacaaaggaaggcataaacatgaaatatttttgcacgtatttaatatgacctgtttttttccaagaatgcaactactatgtaaattgttttgtattgttcagaactttatcaaaagttgtttaccattttggaaaatcacaaccctaatggcaatgctgttctatacaacacccttaggtcagtctgcatttatctctaccacactcttagtgattctaggtatgggtgcaagtatctgactactttatcttctagtgtaatggtgcctgggtatttgcatattgaaacgccatccttctatttgtcttttttttttttttgagacggagtttcactctcattgcccaggctggagtgcaatggcatgctcttagctcactgcaacctctgcttcccgggttcaagcaattctcctgcctcagcctcctgagtagctgcgattaaaggtgcccaccatcatgcctggctaattctttatatttttagtagagatgagatttccccatgttggccaggctggtcttgaactcctaacctcaggtaatccacccgccttggcctaccaaagtgctgggattgcaagtgtgagccaccgtgcccggcctatttgtcttttttataatcaagacatcatattgatttgttttttgaaatcatgtgtccaggcaggttatattatctgttcatttcactttgggatattagtgttgcaaaatatttgttataagaaaggaacattgggactgggtgtagtggcttacacatgtaatcccagcactctaggaggctaaggcaggaggatcactggaacctaggcgttccagatcagcctgggtaacacagtgagaccttgtctctactaaaaacaaaaaaaaaattagctgggcatggtggtgtgggcctgtagtcacagctatttggaaagctgtggcaggattgcttgaaccttggagttccaagttacagccacctatgattgtgctactgcattccagcctgggtgacggagcaagaccctgtgacattggatatggtagggtggaaagtcaccagccaggacattaagaacgcagactcagccaggcatggtgactcatgcctgtaatcccagccctttgggaggctgaggcaggcagatcacgaggtcaggagttcgagaccagcctggctaacagtgaaaccctgtctctaagaaaaatgcaaaaattagccaggtgtggtggcatgcgcctgtagtcccagctactcgggaggctgaggcaggagaatcgcttgaacctgggaggtgaaggttgaagtgagccgaggtcgcaccattgcactcaagcctgggtgacagaatgagactccatctaaaaaaaaaacacacaaaggccgggcgcggtggctcatgcctgtaatcccagcactttgggaggccgaggtgggtggatcatgaggtcaggagatcgagaccatcctggctaacacagtgaaaccctgtctctactaaaaatacaaaaaattagccgggcgtggtggtgggtgcctgttgtcccagctactcaggaggctgaggcaggagaatggcgtgaacccgggaggtggagcttgcagtgagccgagatcgtgccactgcactccagcctgggcgacagagtgagactccgtctcaaaaaaacaaaaaacaaaaaacaaaaaaaaaccacacacacaggctcagcggggtgcggtggctcacgcctgtaatcccagcactttgggagtccgaggagggtggatcacaaggtcaggagttccagaccagcctggccaacatagtgaaaccccttctctactaaaaaatacaaaaattagccaggtgtggtggagcacgcctgtaattccaggtactcaggaggctgatgcaggagaattgcttgaacccaggaggtggagtttgcagtgagctgaaatcatgccactgctctccagcctgggcgacagggcaagatgtgtctcgaaaaaaaaaaaaggggttgggcgcagtagcacattcctctaattccagcactttgggaggccaaggctggcggatcacctgaggtcaggagttcaagaccagcctgaccaacatggataaaccccgtctctactaaaaatacaaaattagctgggcatggtggcacatgcctgtaatcccagctactagggaggctgaggcagcagaatagtttgaacccaggaggtggaggttgcggtgagccgagatctcgccattgcactctagcctgggcaacaagagtgaaactctgtctcaaaaaaaaaaaaaaaaaatgccgggcgcagtggctcacgcctgtaatcccagcactttgggaggccgaggcgggcggatcacgaggtcaggagattgagaccatcctggctaacatggtgaaaccccgtctctaccaaaaatacaaaaaaaaaaaattagccaggtgtggtggtgggctcctgtagtcccagctactcaggaggctgaggcaggagaatggtgtgagcctgggaggtggaacttgcagtgagccgagatctcgccactgcactccagcctgggcgagagagcgagactccatctcaaaacaaacaaacaaacaaacaaaaaaacaaagggccaggtgtggtggcttacacctgtaatcccagcactttgggaggccaaggcaggtggatcacttgaggtcaggaattcaagaccagcctggcaaatatgatgaaacctcatttctactaaaaatacaaaaactagccgggcgtgctggcatgtgcctgcaatcccagctactcgggaggctgaagcagaagaattgcttgaacccgggaggcagaggttgcagtgagccgagatcgcgccattgcacttcagcctgggcaacacagcaagactgtctgaaacaaacaaacaaaaaacacagactctggagatacttttactttcgctacttatagatatgtgactttgagcaagatgattaaccttgctgtgtctgtttcttcatctgtaaaatgggcttaaaaatatctgcctcagaaagttattgagaggattaaatgagctatgtgaggttttgacagtgcctggcacatggtaagtgttactaaatgtcaaacttatgatgacttctgtaacctaatttcttgcctcccccagaagttctaactctatatcaatatattttctgaaccaggtgaggtggctcacacctgtaatcccagcactttgggaggccgaagtaggaggatcacttgaggccaggagttccacaccacctgggcaacaaagggagatgctgtgtctgtgaaaagaaaaaaattggccgggcaccgtggctcacgcctgtaattctagcactttgggaggcctaggcaggtggatcacgaggtcaggagatcgagaccatcctggctaacacggtgaaacctcatctctactgaaaatacaaaaaattagctgggcgtggtggcgggcgcttgtagtcccagctacttgggaggctgaggcaggagaatggcatgaaccctggaggcggagcttgcagtgagccgagattgcaccactgcactccagcctgggggacagagcgagattccttctcaaaaaaaaaagaaagaaagaaaaagaaaaaaaatgtaaaaattagctgcatgtggtcaccagtgcctgcagtcccaaataggaggctgaggcagaaggaccacttgagcccagaagttcaagactacaggccaggtgtggtggctcacgcccataatcccagcactttgggagaccaaggtggatggattatctgagatcaggagtttgagaccagcctggccaacttggtgaaaccccatctctactaaaaacacaaaaattagggccaggcgcagtggctcacaactctaatcccagcactttggaaggccaaggcaggtggatcacctgaggtctggagtttgagaccaaccttgcctacatggtgaaaccccatctctactaaaaatacaaaaaattagccgggcgtgttggcaggcgcctgtaatcccagctactcgggaggctgaggcaggagaatcgcttgaacccgggaggcgagctgagattgcgccattgcactccagcctgggcaacaagagagaaactctgtctcaaaaaaaaaaaaatacaaaaattagacaggcatggtggctggtgcctgtagtcccagctactcgggaggctgaggcaggagaatcgcttgaagccaggagatggaggttgcattgagctgagatcacaccactgcactccagcctgagcaatagagtgagactcattttcaaaaaatagaaaaaataaaaagactgcaggccaggcgcagtggctcatacctgtaatcccagcacttcaggaggccgaggcgggcggatcatgaggtcaggagatcgagcccatcctgggtaacatggtgaaacctcgtctttactaaaactacaaaaaaaaaaaaaaaattagccaggcatggtggcaggtgcctgtagtcccagctactcgggaggctgaggcaggagaatggtgtgaacccaggaggcggagcttgcagtgagccgagattgcgccactgcactctagcctgtgcgtcagagcgagactctgtctccaaaaaaaaaaaaaaaaaagactgcagtgagccattactgtgccactgcactgcagcatgtctttaaaagaccctgtctcttaaaaaaaaaaaaaagtgcgttcagttattggaatgtgccatgattcttcttgctttgcccaaactctccctacaatgcttttccttcacttcttccctggtcaattcctacctgtccctcaagtctcacttagaatatgggtatggcctcacttagttactttcttttttcttcctttagacagggtttcactctattgctcgggctggagtgcagtggccaatcatggctcagcccagccttgatctcctgggcttaagtgatcctcccatatcagcctcccaagtagctggaaccacaggctcacaccaccgtgtccagctaatttttttttttttttttgagacagagtctcactctcgttgcccaggctagagtgcaatggagtgatctcagctcaccgctacctccgcctcctgggttcaagcgattctcctgcctcagcatcccaagtagctgggattacaggcatgtgccaacacacctggctaattttgtatttgtagtagagacggggtttcaccatgttggtcaggttggtctcgaactccccacctcaggtgatctgcccgccttggcctcccaaagtgctgggattacgggcgtgagccaccgtgcccggttatatccgggtaatttttgtagtaacaagatttcaccatgtttcccaggctggtcttgaacttctgggctcaagcgatcccccctgtcagcctcccaaagtgctgggattacaggcatgagccactgcacttgggccatttacctttttcatgaagcctatatcactatttccccaagtctgggtgagatgtccctatattcatcccagcggctgcccttatcacagagtgtgtgatagagcatggggctttacattagctacagtgggcagtgaatgccctctgaggacgaagcatttgcagtaaggcttgaaaaatgaggaagaggcggaggatagccagtacacagtccctgaggtgggaactgctgaatggggtacattgcagtgatagaaatcaggtcctcataatgtagagtgagtgaggaggggacaggcaggggatgaggttgaagagttgggaggctctggtaaggtgtttggacccaccatctccctggctccatcgccccacgtatggccatgcaggatgtagacagctgaaaatctttacctcgtgtccttgatccctatgcctgctgtgttccctgccttctctgattaataataaaattccattcatccttcaaggcccagctccaaaccatttaggaaacctccttccattctttagcaggaattaattgctcccttgtctgacgtcccacagcactaatcacacgctgacttgtatctcagctagctgtttatgccagtctgcccaccaacgtagtgagttccctgagggcagaggctctgtcttagtcacctctgtagccatctcctggtgtttagcaggtactcaatgtgacatttacttgactagtgggtggtgcctagtactactcatggcagaatagaaggaaaacaaaaataataacaacttatgctctatcacgttttcccattcattaactgatttcagctttgcaacaactctatgagacagacgggacaggcactattagacccattttacagatagggtagctaaggcccaatggcacacagcttgtaagtaatggggactaagtcccaatcttgcccccttacttcggattctgtgctgggaatggaattaaaccaagagtattttgaagctataatggaaagcgcttttctgggtggactagggagagatacttagtcagctgtcagggtttaacagcagctccatcaaagagggcacaggatttctctctctggcccaagcagctggaggggtccacagcaccatcctatagccctggaagctggaggaaaccccagcccgagaaagaagagacggtgttcgagtcaggtgggtaagatgacgtaaatgatgacttgtgagcagtggcctgcctctgttgccatgacaaccggagcttgactacttggcctttgcaaggttggccgaggcgggttcttcgttaactcgagattaaggaaggatatttaggggggagggtgtgtgtgtgtgcggcggattaaagacgaaaggagtatattcaacaatgactgtttagctcagtggttctccaccttggcaacacgttagaatcacctgcaacaatttcctgatgcctaggctgcaccccagaattaaattataatttccaggggtgggaaccaggcatcatagtatttaaatcttgccaggtgattccaattgcagctaaagttgcaaacccagcttttagctggtaagcggaattcctgtgaccttcctaagatggcgtccactcaaccgcttccgcctttacgtgggccggcagggggcgggcttcccaggggcgcatgcgtctcgcatctctccgctccctgctctctcctcctttttcccccgcctccattttgttcgcggacgctggggacggtgggagcagatccatttccgggttggcaaaaggggcggtggcggcggcggcggcggcggcggcggcggcgacggcgagaaagagcttgccggggggcgagcaggacaggacgaagccggagtgtaggcggcagaggattcgctcccagagcagctgcggccaggtcggaaagaggccggggcggctgggtcagtcgctgaaatgacctgcggacctgagtgggagggaaagtcgcggggaggggggctcggggcggggcttgagaagagaggggggcattagaggaggggccggagggggagaggggtcttgcgggtggggcctgaggggcggggggccgggggactgtatcggaagaacctggaggagagagggcgtggggaatctggggaggagtggtcgaatattggtatggggcgagcggggactggaaaaatggggaggaacgtttttgagagacaggcaataagggctcctgaagggttgggtgagttaaggcggcaactctgtgaggaacgaggtaatcgtgcgcaaaaagggagacgggaacggaggacctgttgggaacggctaattagcaggatgctgtgggtgaggagtccagtgtgacattttggggattgagttaggtgaaagctagtgtttgggaagatggctcgggaaactgcttacactagagggaatcttgagagcgttctttgaaaaggaatcagaatttagttaaaggttggattgagaatgttaagatgcgcattggaacgtctggagttgagggttcatgttgaagtggtgtgaagtgagggaagatggaatttttttttttttgttttaaaggtggggtctggctatgttgctcagactagtcttgaactcctgggctcaagcgatcttcccaccttggactcccagagtgctgggattacaggtgtgagccactgcacccggccaagatggaaatgttaaagtgttcagcatggcagtgtgtatggtcgagttttttatcaggaaggaaagttcttaaaaatagcattgaggcaaggaactgatatgtgatggaattcttttttctttttttttcttttaagagacgtggtctcactctgtcgcccgggctggagtgcagtggcatgatcatggctccttaaagcctcgacctcccgggctgaagtggtccttccacctaagccccgccaatagctgggaccacaggtgtgaccactactcccgcctaacgtgtgtgtgtgtatatatatatatatatatatatatatatatatatatatatatatgtatatatatatatttttttgttgttgttgttggagacagagtcttgccctgttgtccaggctagtctggaattcctgggctcaagtgatcctcctgtctcggcctccgcaagtgctgggattacagggatgagccactgtgcctggcccagaattcgttttttttttttttttgagatggagtctcgctcagtggcctaggctggagtgtagcggtgcgatctcggctcactgcaagctccgcctcccgggttcacgcccattcttctgcctcagcctcccgagtagctgggactataggtgcccaccaccacacctggctaatttttttttgaatttttagtagagacggggtttcactgtgttagccaggatggatggtctggatctcctgacctcgtgatccgcccgcctctgcctcccagagttctgggattagaggcgtgagcccctgcgcctgtccagaattcatattttttaaaggacttgaataatctgttattgctttgggctctcccagggtccccgtcctttttcatgctgttatttttgccttacggttttggtttttgactgtcttactgaatgtttttggctattctgttctccttttacaaatcagaagagaaccacagggaataaggacagttttagcctacctatggatttagtaaataacttcaaggcaaattattaagctctcatttttttcccctttgaaatataggttttctctgtccctgcctctaaaagtttgtcttaacacatgggatctttaaagtggttgcatagaagtgatctctgaaaatgagattgagatattgatatttaaaagacatacaatggtgcacctgcctgtaatcccagctacttgggaggctgaggcaggaggattgcttgagtctaagagttcgagaccattctgggcaacgtagcaataccccatctctctctctgtctctttttttgtttgtttgtttaagacggagtctcgctctttcacccaggctggagtgcagtggcgtgatctcggctcactgcaacctctgcctgccggattcaagcgcttctcctgcctcagtcccccaagtaactggtactataggcatgcaccaccacgcccagctaattttttgtattttagtagagatggggtttcaccatgttggtcaggctggtctcgaactcctgacttcaggtgatccacccacctcggcctcccaaagtgttgagattacaggcatgagctaccacacctggccgcatgtttagttttttaactcttattaatgtcaacttttaaaagtaaaaatttcatattgtgttacattggttgccatcaagatgaagatagggaagttaagagttggggaaggtggagatgaatgaagtcaattgatgaagactagtagaatgtagtgttggtttttttatttgtttatttatttattttgagacagagtcttgctgtattgcccaggctggagtgcaatggcacaatcttggctcactgcaacctctgtctcctgggttcaagcaattctcctggctcagcctcccaagtagctgggattacaggcgcgtgctgccacgcccagctaatttttgtatttttagtagagacagggtttcaccgtattggccaggctggtctcgaactcctgacctcgtgatctgcccaccttggcctcccaaagtgctgggattacaggtgtgagccaccgcgcctggccgacctgtctcttaaaggaaaacaaggctgggcgcgctggctcatgcctataatcccaacgctttgggaggccaaggtggtggatcacctgagattgcagtgagctgagatcgcgccattgcactccagcctgggcaacaagagcgaaactccacctcaacaacaacaacaacaacaacaaaaggaaacatgtttttctgtttcttcctcttagccttgctcatgtgtgtgtgtgtttgtgtgtgtgtgtgtgtgtctgcgtgccagccagggaagaactggttttgatttgatgcatattcagtttttttttttttttttttttttttttttttttgagacagagtttcgctcctgctgcccaggctggagtggaatggcgcagtcttggctcactgcaacctccgcctgccggattcaagcgcttctcctgcctcagtcccccaagtaactggtactataggcatgcaccaccacgcccagctaattttttgtattttagtagagatggggtttcaccatgttggtcaggctggtctcgaactcctgacttcaggtgatccacccacctcggcctcccaaagtgttgagattacaggcatgagctaccacacctggccgcatgtttagttttttaactcttattaatgtcaacttttaaaagtaaaaatttcatattgtgttacattggttgccatcaagatgaagatagggaagttaagagttggggaaggtggagatgaatgaagtcaattgatgaagactagtagaatgtagtgtttgtttttttatttgtttatttatttattttgagacagagtcttgctgtattgcccaggctggagtgcaatggcacaatcttggctcactgcaacctctgtctcctgggttcaagcaattctcctggctcagcctcccaagtagctgggattacaggcatgtgccacctggctaatttttgtatttttagtagagacagggttttgccatgttggccaggctggtcatttactaattccacctcacacttgatactagagtagtgtttaccctagctggtactgataagttatgtgatagcaccaaggtgaaatgcaggagaggtgtgaacattggagttttcaggttttactgatggcttttacgaagggaagagattctagactcactaggtgtttttaggaaaaaaaaaaggcaagaggcaagagacagaagtcttgttctgttgaagagaaaatttttttttgggttttttttttttttttttgagacggagtctcgctcagttgcccaggctggagtgcaatggcatgatctctgctcactgcaacctccacctcccaggttcaagcgattctcctgcctcagcctcctgagtagctgggtgccatcacgcctggctaatttttgtatttttgtagagacgaggtttcactgtgttggtcaggctggtctcgaacttctgaccttgtgatctgccagtctcggcctcccaaagtgctgggattacaggcgtgagccaccgcgcccggcccgagaaaattattaaatgttctttctttacttgtgttctctgattgggagagtaacctggtatatgttagtctgttttcctgctctgaaataactgtgaaattcatgggctcttggttcaggcagcttcagcaaacatagtcttcttacaaccccaggaagagttgcaggctacaaaatatatgtacttatttgggagtaaaaacctgcttaatattatgctattgcaacctacagtgtacctttttggtttgttttttaaggggattttgagataacatatggaggctcggtgctcctgggcggacttttggtacagcctgcttattttttttttcttttcttttcttttttttttttttttttgagacggagtctcactttgtcccccaggctggagtgcagtggcgcaatctcggctcactgcaagctccgcctcccaggttcacgccattctcctgcctcagcctcctgaggagctggactacaggcgcctgccaccacgcccggctgattttttgtattttttttttttttttttttgtagtagagacggggtttcaacttgttagcgaggatgtcttgatctcctgaccttgtgatccacccgcctcggcctcccaaagtgctgaaattacgggcgtgagccaccgcgcccggcccagcctgcttctttaacataatgattttccatttttcctatcctgtcacagttttccgttgctctgcttgagccagtcctatgtagaaagtggcaaattacacattttttctccccttttagtctctggtggacatcttgtctgtgtcacagtttgatactaccaaattgaaaggattcttcactgcttcagatggggagggtgacagaagctgagctgtttcctgggtcagataatggcctctgtcaaagcaaagaatagttgtagagacacaaactgggcccttgaagctgtgactaacattttggcaacatgcatccctttgccaaataacttcttttcttcttgagtgtgattgttgatctccttctcaaagtaggctcttgttgctactattcttcacacaactcccaagcaaaagttggcagagttccggttgactgactgtgtcttgagggatatgccccggattagagtggatggggcgttccatgtcaaaatgaggttcattggcagatcctgagagctgctttgcaaagaaatagaggcagtactctttactgaatgttcttgcggtcctttatctttcttctaaattcaagtctgtttcttattcatctagtgattaaatgcagaatcattgcctttgcctagcttcgtgggcattgtggaagagaagacagtatttccaactttttttttttttttcttttctcacaagccattgagcctgaggaactacaggctaaatttatgagcatttcttgatatctacagagggctactaaaaaaaaaatgctgaatagacctttatggggaacaacaatgttaataggaaaaaaaggtgatatgtttgctaatgtctatgtcagtcttaactctctttaagattttggctcattttggcttaagagcctgcagaagtatgtaagttatcaaataggggagccaggaattggtttcttccttgccatttaagcttggcaaagttagagcaatttggaatggctatccaacaatgtgttctacttagtaaatactctcttgtttttcaggggatagttagctaaaggtagggttatctccaatatgttttgggatggatcgtgaagatcattccctttttattttgagacaggatctctctctcttgcccaggctggagtgtggcggcgtgatctgtagcctcgacctccccaggctcaggctcaggtgttcttcccacttcagcctcctgtgtagctgggactacaggcgcacgccactatgcctcactaatttttattttttgtagagatggggtttcgccatgttgcccagcctggtcttgaacttttgccggcctcccaaagtgctgggattataggtgtgagccaccaggctcagccattataattgattttcaaaaaaaatttagtttcttaagcttcatggattcaaattgagtgccatttggattttgaggcccctcagtggaaataatttgtttttagcaagtaattatgatatttctaaagtgcaaattcactgacctactttctgtgcttctggaaatgctgaatcgaataatctttttttttcctcccaataatccctctgactgtgaaaacattctccatatgtattcagattgggatagttggtaaaaaaaaaaaaaaaaaaatttttttttttttgagatggagtctcgttctgtcggccagtctggagtgcagtggtgcgatcccagctcactgcaacctccacctcccgggttcatgcgattatcctgcctcagcctcccgagtagctgggattacaggcgcacaccaccacacccggctaatttaatttttttttttttgtatttttagtagagacgggatttcactatgttggccagactggtctcgaactcctgacctcgcgatccgcccaccttggcctcccaaagtgctgggattacaggcatgagccactgtgcccggcctttggaattttcttctaaggtagtacactagtatgagatgcgatgtctgagatttgtggataagtggacttttccttcttccattcctgccctcccagtgctcacctagtagggaggatgtttattatctaagatccagatgtgagacatttaaactgcttctttccttgtcttagaaataagaacagaactgtttttagcaaattttatttttttaattttttaaatttattattattatttttgagactgagtcttgctctgttgcccaggctggagtgcaatggcacaatctcggctcactgcagcctctgcctcctgagttcaagcgattctgctgccttagcctcctgagtagctgagattacaggtgcacgccaccatgcccaactaatttttgtattttttagtagaggtggggtttcaccttgttgcccaggctggtcttgaactcctgacctagtgatctttccgcctcagcctcccaaagtgctgggattacaggcgtgagccaccacgcccagcctatttatttatttttttttgagacagagtttcactgtgtcagccaggctggagtggagtggcaagatctgggctcactgcaagctctgcctcccaggctcaagcaatctcctgcctcaccgtgtcaagtagctgagattacaggtgtgtgccaccacgtccagctaatttttgtatttttagtagagacggggtttcaccatgttggccaggctggtctcaaactcctgacctcgtgatctgcctgcctcggccttccaaagtgctgggattacaggtgtgagtcactgctcctggccacaaatgttatattttaaataaataatacaaaatttaaaagataaaaaagtatataagcaggatggtggccatggaagtcagaatccactaaggagtatgtatcaactcacctgccaagaaaaagaaagtatatagtgaatacccttggaaacatctatgtttgtcttcctatcaatccagttcatcttcccagaggcaactcgtattattattttctttagatctgttccaggctggttgcggtggctcacacctgtaatcccagcactttgggaggctgaggcgggcggatcacctgaggtcagaagttggagaccagcctggccaacatggtgaaaccctgtctctattaagaatataaaaattagcggggcatggtggtgtgtgcctgtagtcccagttactcgggaggctgaggcacaagaatcacttgaacctgggaggcggaatggtgagctaaaattgtgccactgcactccagcctgggtgacagagcaagactttgtctcaaaacaaaacaaaaaacaaaaaaagtttgttccagagataccaggtacatataaagcaaatatgtatatttcttgtttttttttttgttgttgttgttttaataaatgtagcacactgttaatactatctgtatcttttgcttgtttttatacctctttttgtttttttttttttttttttttttgagacggagtctcgctctgtcgcccaggctggagtgcagtggcgggatctcggctcactgcaagctccgcctcccgggttcacgccattctcctgcctcagcctcccaagtagctgggactacaggcgcccgccactacgcccggctaattttttgtatttttagtagagacggggtttcaccgttttagccgggatggtctcgatctcctgacctcgtgatccgcccgcctcggcctcccaaagtgctgggattacaggcgtgagccaccgcgcccggccatttttatacctcttttgactgttactccctatcagcaataaagatacttggcacctaccttacactgatagacatacacagtttccagtcttttgctattacaaactatgctgcagtgaagaagcatatatatttggctctttgcatatatgactgtgtctgtagggtaaattcttagaactagaattgctgaagctgattttttttgatgttcgttattcatttattcaacaagaatttttgagttcctactgtgtgccaagtactgtggtaggggatgcaggggatgcagatagggcagtgaacaaattttcttggtctttttttttttgagacagagtctctctctgtcacccaggcgggaatttagtggtgcaaacatggttcattgtagcctcaaccttctgggctcaagcagtcctcccacctcagcctcctgtgtagctgggaccacaggtgtgtgcacaatttttaaaattttttgtagacgtgaggtctcactttgttgcctaggctggtcttgaactcgggcttaagcagtcctcctatctcgaagtgccataattacaggcatgagccaccacacctggccctgacttggtcttccacttacggtggaagactttttttttttagacaaggtttcattcccatcttggctcactgcgacctccacctcctgggctcaagtgattctcttgccttagcctcctaaatagctgggactgcagatgcatgccaccatggctaatttttgtagtttttgtagaggtggggctttgccaagttgcccaggctggtctttttttttttttagatgagttttgttcttgttgcccaggctggagtgcaatggcatgatctcaactcaccgcaacctctgcctcccgggttcaagcgattctcctgcctcagcttcccgagtagctaggattacaggcatgcatcaccacgcccggctaattttgtatttttagtagagacggggtttctccttattaggctggtctcgaactcctgacctcaggtgatccgcccacctcggcgtcccaaagtgctgggataacaggtgtgagccgccgcacctggccaaagacatttattcatttatttatttatttgttttagacagagtctagctctattagccaggctggagtgcagtggcatgatcttggctcaccgcaacctctgcctcccaggttcaagccattctgctgtagcctcccaagtagctgggactacaggtgcaccaccatgtctggctaattttttctgtatttttagtagagatggggtttcaccatgttggccaggctggcctcaaaactcctaacctcaagtgatcttcctgcctcggcctcctaaagtgctgggattgtaggtgtgagccaccgtgcctggcccaaagacatttattaaacaaataattattactgttgctgtaaatgctgtggagacagctaatggttagcccatcccaggttgattgagaggaagggcagtcagagaaggtctctgaggaattgacttttaagggtgaaacctaagaatgaagggaggacaaaagactgacctaggtagaggagatggcacaggtgaatgtcctgaggagggaaagaatgtttgtattttgaggaattgaaagaggttccagtgtggctggagcttagggagtgaaaaacagacaggtaggaggcaaggcttcagaatgtgagctgtcctaaaaaatgggtaaataggctggcatggtggctcatgcctgtaataccaacactttgggagaccaaggtgggaggatcacttgagcctagaagttcacaaccaatctgggcaacatagggagaccccccagtctctatataattaaaatattagctgggcatggtgatgagcacccgtggttctagccgctcaggaggctgagggaggaggatcacttgagccccaggagagggaggttgcagtgagctgttgcagcaccactgcactccaacctcggagacagagtgagaccctgtttcaaaaaacaacaactaaaagagtaataggatagtgaattttgaggtcagcttctaaaatagggcttttttttttcctgtcagttcttttactagtgttgatgatgagaccatcagtgtcataaagaagtctgatgcttgtgcagtgaaacagtttttataagaactttcctggatgaaacctattcttttagtcttgatttctcataggtcctgcaaatcaaacttggttggctggattagctcttaaaattttaggatcttagaaattgttttggagattaggcttattggggaacaatttttagattatgggggatgatgggattgttagtttaccagacttgctatttaggaaacagaaaacctatttacttttagtgggaggagcagggaggagtgtttaaaaaaagaaaaaacttatttactgttagggaatgttgactgttttaaaaataatcttcatggtgctagggagagaacagatgttcttttattttgaaccgatgaatatactgtcatacccatcatctaggccatatgtcttagcatgacacgtaagtcttgttggacacgcaaggtagcccaagggccattataattctgaatatatgaaagtgtttttatctgcaagtgtattgacttttgttcagaaatcacagtacttaaaacccagatggtcctgtttgatttagtacttctgtttaattggatcagcttgccctgtttttataacttaaagtagactcttgacttagcagcccatcactagtgatcaagggacggaaatgtgcaaattttctagcatttcagcaaggagcatctgtgtttctgatggcttaagggtattagaatgtaagagaagagactccttgacaatgaaagtcacagatttgttattagattatctgtggtgagttgggacttaatatattatctttgaaatgaggcatgacacttgtctccatgtgaagtctggatcagcattttatggagcatctgtttaagttttctttcaggccttttcttagtggggactgtcatcactggattttccttctatctgactgttctctgtgcttttctacctttttttttttttttttttgagacggagtcttgctctgtgtcccagctggagtgcagtggcacgatctcagctcactgcaacatctgcctcccgggttcaagcagttctctgcctcagcctctgagtagctgggattacaggtgcccgccaccacgcccagctaattttttgtatttttagtagagacagggtttcaccatcttggccaggctggtcttgaactcctgaccttgtgatccacccgccttggcgcctcaaagtgctgggattacaggcgtgagccaccatgcctggccgcttttctacttttatatatggagcgtgcagatgaagcctggctcttggaagttgggagctagtaataatatgagatatggctagcttaaaatctgagaagagctgtttttttttggtcatcaatgactaggtttcagcctgcctcgtaattgtattttaaatctaattaacagtttcttagaatgtctaaagattctttgattttttctttctttttttttttttttttagcagttagtggcattacattgaaaacaagacctaaaaagagagttaaggtaattgattttactttttttttttttttgagacaggatctggctttgtcacccaggctggagtgcagtggtgtgatgtctgctcactgcaacctctgcctcctgggctcaagcgatcttcccacctcagcgtcctgagtagctgggattgcaggcacatgccaccatgcctggctaattttttttttttttttttttttttttttgagacagggtctcgctctgttgcccagaccagagtacagtggcgtgatctcagctcactgcagtctgtggctcccaggttcaagcaattctcatgcttcagcctctggagtagctggaatcacaggtgcacgccaccacacacagctaatttttgtagttttagtagagacagggtttcaccatgttggccaggctggtcttgaactcctgacctcaagcagtccacccgccttggcctcccaaagtgctgggattacaggcatgagtaccaccatgcctggcctaatttttgtatttttgtagatgcttttgccatgtttcccaggctggtctcgaattcctgagctcaagtgatccaccttggcctcccaaagtgatgggattacaggtatgagccaccgtgcccggccagtaattgattttaatattaatttctctttttttttttttgaggtggagtttcactcgttgcccaggctggagtgcaatggtgtgatctcggctcactgcaacctctgcctcctggttcaagcgattctcctgcctcagcctcctgagtagctggaattacaggcatgcgccaccatgcccggctaattttgcatttttagtagagacagggtttcaccatgttggtcaggctggtcttgaactcccgacctcaggtcgtctgcccgcctcggcctcccaaagtgctggtattacaggcgtgagccaccatacctggctcatttctctatttttgtgcatacctttgcaattaattttggttatgatttcctatggtagattggaagttgctctcatatttgccctctgttagagtaagctgtggggttgttgatcactgtgtggttacacccaggctgtggcagagattcaggtcacattagccagcctgctgccatttgagttgagtcaagatactgattctagagttgggcttaattaagtctttaaaattttttgttttgtttgggattttctattctccttaactgcattggtaccagatccaacgttgaccttatattttgaaattttggtcagtttgtttatatggtgattttgcttatacagtgttagggttttttgatttttggtaattgttttttgtcaaaatagtaagaatacataaagaatcagacagtactacaaggcttataattagaaaaaaaacactactttatttctgcttgtttgtttttaaccacttttgcaattttttttccctgatgtatattatccatatttctatatagtatgtttaggctgtttattctttctttttttttttgatagatgaagtcttgctgtgttgtccaggatggcattgaactcttgggctcaagcagtcctcctgccttagtggggagtacaggtgtgcaccgctgcacctggctatacagttctttcttgagttttccattcttacatattatctgttgaggctgaaggtgatggcacaagcctgtaatcccagcactttaggaggccgaggcctgagattgggagtttgagaccagcctggccaacatggtgaaaccccgtctctactaaaaatacaaaattgggccgggcactgtggctcacacctgtaatctgaacactttgggaagccgaggcgggcggatcacctgaggttgggagttcgagaccagcctgaccaacatggagaaaccatatctctactaaaaatacaaatttagccaggcgtggtggtgcatgcctgtaatctcagctactcgggaggatgaggcaggagaattgcctgaatgtgggagacagaggttgcggtgagctgagattgtgccattgcactccagcctgggcaacaagaagaaaactccatctcaaaaaataataataaaaaaaacaggccaggcacagtggctcacgcctgtaatcccagcactttgggaggctgaggcaggcagatcacaaggtaaggagattgagaccatcctggccaacatggtaaaaccctgtctctactaaaaatacaaaaattagctgggtgtggtggcaagtgcctgtagtcccagctactcgggaggcgcacgcctgtagtcctagctactcgggaggcgcatgcctgtagtcccagctactcgggaggctgaggcagaagaattgcttgggagaacctgggaggcggaggttgcagtgagctgagattgcgccactgcactcaagcctggtgacagagtgagactctgtctcaaaacaaacaaacaaacaaacaaaaaaaacaaccggaaattatctaggtatggtggcatgcacttgtagttccagctatttgggaggctgagaggtgggaggatcacttgagctggtaggtcaaggctgcatgcagtaagccatgatcacaccactgcactccatcctgggtgaaagagcgagaccctttcttcaaaaaaaaaggaaaaccatttttgttatttcaaagaggatattttagatgcttacaagaccattggaaggctggaagagcatagatcagggaaacctcgttgcaggaatttcaagaaatggcttctgttaataatcttagctgccttaagcaccaaaacaggcagtttgcagaaaattagaaatggctgcaaaccacatgtctgccatctgtccgaggccacgcacgctctcgttgctactggagaagcaataatggcatctacccttcttccattgtgcaaatcttctttttttccttttttttttttgagacggagtcttgccctgtcacccaggctggagtgcagagtggcgcgatctcagctcactgcaagctctgcctcctgggttcacgccattctcctgcctcagcctccctagtagctgggacaacaggcgtccgccaccacgcccagctaattttttgtatttttagtagaggcggggtttcaccgtgttagccaggatggccgcccgcctcggcctcccaaagtgctgggattacaggcttgagccaccacgcccagcccattgtgcaaatcttaagtgttggtagaatttaaaccacaatggcactgatggaggattctgataaatgtagttcccaggcctccagatgaatccagaaggaagtagaagtgaaagttacaaaagaaaaaaaatttagcgcccagtataatgactgtatcattcgattacctttacttccttgtgtagtttttccctagacatagtaattgtcattcttttccttccttcccttttttgttttctgcttgttttacggaaagtcactgattcatccctaaactctgacaggtataaacctcttctcatcattgaagcacattagtggagcacctcttccagaggctttatgaaaggagtctttggagagtgagactttttttttttttttttttttgagacggagtttcgctcttgttgcccaggctggagtgcaatggcacgatctcagctcaccacaacctccgcctcccgggttcaagcaattctcctacctcagcctcccgagtagctgggattacaggcatgcatcaccatgcccagctaattttgtatttttagtagagaacgggtttcttccatgttggtcaggctggtctcgaattcccgacctcaggtgatctgcctgtcttggcctcccaaagtgctgggattacaggcatgagccaccgcgcctggcctctggagagtgggacttttttgaggccttgcatatctgaattacctcctttcttccttcacacttggcagtttgactggattaaaaaaattttttttttttttgagatggagtcttgctctgtcacccaggcccgagtgcagtgatgggatctcggctcactgcaacctccgcctcccatattcaagcgattctcctgcctcagcaccgccccgagttgctgggattataggcatctgccaccacgcctgggctaattttttgtatttttggtgactaaagggtttcattcaccgtgttggccatgctggtctcgaactcctgacctcggggtgatccacccgcctcagcctcccaaagtgctgggattacaggcatgagtcaactgtgcccagcctagatataaaattttctactggagattatatttctttggaaattataagcccttgctttgtggtcttctaacctttttttttcttttgagacagagaattgctctgttgcccaggctggagtgcagtggtgcaatcttggctcactgcaacctccacctcccggttcgagcgattcttttgcctcagcctcccgagtagctggaactacaggcgtgtgtagagatggagttttgccatatcagccaggctggtctcgaactcctggcctcaaccgatcctcctggcttggcctcccaaagtgctgggattacaggcatgagctgcctcactcagcctctttttttttttttttttttaagacggagtctcactctgtcgcccaggcaggagtgcactggtgcgatctcagctcactgcaacctccacctccctgggttcaagcaattccctgcctcagcctcctgagtagctgagattacaggcgcccaccatcacggccggctaatttttgtgtttttagtagagacggggttttaccatcttggccaggctggtcttgaactcctgatctcatgatccacccgcctcggcctcccaaggtttctaacttttaatagtggcattatgaagtttgatgctattttgactctagattctttgtatgggatctgtgttttttctctggaagactttaggatcttgcctttatccctgacattctgaaatgcaaccatgttgtgccttggtgtggatatttaaaaattcatcatactcagcattcagtggaccttttcagtctggaagcttatttcaatctatcctgggaaattttcttgtattatttcttgtattgataatgtattctcactttgataattatttatctcctctctctttctggaaacgctgttactcagatggtgaaactcctaggttggtactctaatttttttttcctattcaatttttcctttttttttttttttttgagacagagtctcactttgtcatcctggctggcatgcagtggtgctatctcgggtcaccgcaatctccgcctcctgggttcaagggattcccctgcctcagcctcctaagtagctaggattacaggcgtgcgccacaacgcccgcctgatttttgtatttttagtagagacagagtcttaccatgttggccaggctggtctcaaactcctgacctcaaatgatccgcctgtgttggcctcccaaagtgcttcggataacaggtgtgagctaccacgcccaaccctaatttttttttccttcattcaatttttgtgagatttccttagctgttcttccgactctctgttgtcgcttaattcctgttatcagtttgtttaatttccaagggctttttgttttttttttagacagagtcttactctgtcgcccaggctggagtgcagtggcgtgatctcggctcactgcaacctcggcctcccgggttcgaatgattttcctgcctcagcctcataagtagctgggattacaggcacacaccaccacgcccagctaatttttatatttttagtaaagatggggtttcaccctgttggtcacggtggtctcaaactcctaaccctgtctctactaaaataccaaaaaaaaaaaaaaaaaaaattagccaggtgtggtgacgtgcgcctgtaatcccagctactcaggaggctgaggtaggagaattgcttgaacccgggaggcggaggttgcagtgagtcaagatggtgccactgcactccagcctggcaacagagggagactccgtctcaaaagaaaaaaaaaaagctcttgaccttgtgatccacccgccttggcctcccaacgtgctgggattacagacgtgagccaccacccctgtctccaagggctctttttattatctgaattttacatgtatttttggacattgtcaggaattctgttttgttactttgattcttatctttcgtgttagagattttcttcagttgtttgataattcttagctgcttattcaatttttattatttatttgtttatttatttgagatggagtctggctctgttgcccaggctggagtacaatggcacgatcttggctcactgcaacatctgcctccccagttcaagcaattctcctgtctcagcctcccaaatagctgggattacaggcacccgccatcatgcccggctaatttttgtagttttgtagagacagggttttaccatgttggccaggctggtcttgaactcctgacctcaggtgatctgcctgcctcggcctcctaaagtgttgggattacaggtgtgagccactgcacctgcccttatttatttatttattattatttttttgagacagaatctcactctgtcgtccaggctggagtgcagtggcacaatctcggctcactgcaaacctccgcctcccgggttcaagcgattctcctgcctcagcctcccgagtagctgggattataggcgcttgccatcagtgtggctaatttttgtatttttagtagagatggggtttcaccaccttggtcaggctggtctgaaactcctgacctcatgatccgcccgccttggcctcccaaagtgctgggattacagacgtgagccaccgtgcccggccatttattttttaagagatggggttttgctgtggggctcaggctggattcaaactcctgggcttaagttatcctcctacctccaagtagctgggactacaggctcatgccactgtgtctggcttctgtttattttattttatttatttatttatttatttatttatttatttatttatttgagacggagtctcgctctgtcgcccaggctggaatgcagtggtgcgatctcggctcactgcaagctccgcctcccaggttcacgccattctcctgcctcagcctcccaagtagctgggaccacaggcgcccgccaccacgcccggctaattttttgtatttttagtagagacggggtttcactgtgttagccaggatggtctcgatctcctgacctcgtgatccgcccccttcagcctcccaaagtgctgggattacaggcgtgatccactgcgcccagccttggcttctgtttatttttaagaatgtgacactaagaagctcatcaagtggtggaccctactatagggtattgggattacaggcaccctggcaggctggtaaaaggactcctccagtcccctgcctagagagtataagccagtggcaggtgtttgagtgtaagtctggctgccaatgtttttggagccaagtgagagaaaggagctggggaggtaggagaggtctcaccgttgactcattaggcttttcacttgatacccttatttccgtcactgcccttagctgtgactagttcctttggactctttggttcagcttttctttttttttttttttttttttgagacggagtctcactctgtcatctctaggctggagtgcagtggcgctatcttggcccactgcaacctctgccacccggcttcaaaggattctcctgcctcagcctcccaagtagctgggattacaagtgcctgccaccgtgcccggctaatgtttgtatttttaatagaggtggggttttaccatcttggccaggctggtcttgaactcctgacctcaggtgttccacccaccttggcctcccaaagtgctgggattacaggcatgagccaccgagcctggcctggtttaacttttctaatttgcctggcagcatggggagggatggaggaatccatttgttatacagacttttctttttttttttaagatggagtcttgctctgttgcccgggctggagtgcagtggtgcaatctcagctcactgcaacctccacctcccaggttcaagcaattctgctgcctcagcctcccaagtcgctggcaactacaggcatgagccaccacaatcggctaatttttttgtatgtttagtagagacggggtttcaccaggttgaccaggctggtctcgaacccttgagctcaagtaatccacctgcctcggcctcccaaacttctgggattacaggtgtgagccaccgtgccagtcccagactttcaaccagtcctcctgtttagccccttctacactatcaccccatcttcccgaggtaccaggtgcctctaatttctgagacgttttgattcagaagttcatctgtggtgggaatctgcttgcttcttcccactgcagtgttttgttttttttttttacttttgtgaagttatttatcactagtgcatttgctttttaccttccaaaactttgttgacatctctctctctgctgtctcctttcccagtttttttgcttgttgtttggtttatgtctttataaaaaaaaatcctggccaggcacggtatctcacgcctgtaatcccggcattttgggaggctgaggcaggcagatcacgaggtcaggagatggagaccatcctggctaacacagtgaaaccccgtctctactaaaaatacaaaaaaattagctgggcgtggtggcaggcgcctgtagtaccagctactcgggaggctgaggcaggagaatgacatgaacccgagaggtggagcttgcagtgagccgagatagcgccactgcactccagcctgggcaacagaatgagactccgtctcaaaaaaaaaaaaaaaaaatccttttgctgtaattttaatggtgttttatgatggaacattgattaatgcatgcaatatattatgtttaacatgttattcaacatattcatcagcttttccttgccaatatccattcagacaccacagtgtctttacagttgattactaatactcctttagcatagtgttttctagacttccctaacaccaagaatcacttaaagtgcttgttggatatacagattaccagatcattctcctggaaaacttctgattttagttggtttagattagcgcccagggatctttttttaaagtgtgtttgtttttaaacaaatgccctaaatatgtcttatcttcaggcaagtttggaaaccctgctttagaaggattctttttaaaccattaatgccatcttacatctccatggcaaactccttagccttcccctaatactgcttttgtattcagactctgttttagcctgtctagctttggtctggatttctgaattagcatgtgtgtctttcctctgattaactcccctctttagtattaaatgttggctgatggtaataactttgggcttgtgtgacttcattttttttagtcagcgtctctaaacccgctcctgggatgtacaggggaggaaatactagttatgaacattgagctgctctgcaccaatttactaagtccaggaatcagtgtttttggtgaaatggaaaattgactcaggctttgaaaacagatgtcctaatctgccttgggtttatgcagcgtcatttttggagatgttgaagcactgtgatttgaagtttgtttttaactttacaatcaaaaggacacaattctcccttttgtattatagattcctacgcctagaaaagaaaaagggttgtatcttttgctgccagtctgtaaagtatctggaaatgtgtttgcagctgctccttggttgtgaattgcttagaggttaagagccaaatagtacttgtcttagcagtgttgcagaggctaactgtggtaccctagttctcagttcttggaaatcttgtggctgttattaactaaaatacagctgaggaggccatgttggctctgacatagagttgatttgcattctaagatgagcagctctatagaaatagctgtaatacaattttacaacttccattgaaacagttttttggaaggctatggcaggaggattgtttgaggtcaggagtttgagactggcctgagcaacatagtgagatcctgtctttgcaatcaaaataaaacgattagctggatgtggtagtcccagctactcgggaggctgaggtgagaagattgcttgagcctgggaggttaaggctgcagtgagctgtgattgtgccacttgcactgcaatctgggttgtagggtgagaccctttctcaaggaagaaagaaagaaaaaccaagaaattttttgttgttgttgttgttgttggtttgttttttgagacagtctcactctgttacccagtggcacaatctcagctcgctgcaacctccgcctgccgagttcaagtgattctcctgcctcagcctcccgagtagctgggattacaggcgcccgccgccacgcctggctaatttttttgtatttttagtacagacggggtttcaccatgttggccaggccggtctcaaactcctgaccttaggtaatccacctgcctcggccttccagagtgctgggattacaggcatgagccactgtgcctggccaagaaacagttttgatgaacaaagtcacaaaaacaaagctacatcgaaagtgttattgtctcattgattattggtcactggctgtgttataaggcatgactttgaactattactgatttactgcagttgactattttctgtacacgtccgcctatctcccagtgctgtacttcagtgctttcaggataatgagattttttctttgccttgaggggttgggcgtgaggtcattccctgacttctgttttggatgattttcagatatttaatttacatggcttttgcattagttattcctagtctgtctttttaaatgaagctttctttgcagctctggttatttaattgaacacaggagtagacttctcattgatttgtcatcattttagatgagaggactcagctcctgggctgccttgtatctgggaataacccatagtatctaatatttaccacataaggtagtatatgaaggtagtcttccgaatttacatttttagggctttaaaaaaataatctggggctggtctgatggtagtgggttatcagagcttattaacattagtgtcactgcagttggtatacaaaccccccactgctaaatttgactggctttaaaaaaaatctgggggaagaggaaagagtcacattagtggggaaagctgcgttttggggatgcattatgtttttgttaaaaaaatatgtttgaaagaatttcatcattcagtagttatatcttcttcctccttcattttctctttcagagaggagtaaaacatccaggtttcatttgttgtagaagtcctaggatttttcaggtttttttttttaagacagagtcttgctctgtcgcccaggctggagtgcaatggtgccatctcggctcactgcaacctctgcctaccgggttcaagcaattctcctgcctcagcctcctgagtagctgggattacaggcatacgccaccacacccggctaattttgtattttttttttttaagtagagatggggtttctctgtattggccaggctggtctaaaactcctgacctcgggtgatccacccacctccacctcccaaagtgctgggattacaggagtgagccaccacgcccggcccgatttttcagttttaatattcatgatggttatgtgattttttttattacttgttggatcagtcagatttgctgcatagttgaatttctgtgatgaaaatttctgtagttgaaaaatttttttcccttaagtaaccttggaattttaattaattccatctctacatgtgatagaaatctgtttcaccagaggtttgactgaattgaatttcaagaagtggtggcactttctccattgagaggagagggctgtgagctatagaaaaagcctttttttggagtggtagtggtaaaatgtgtgtaacatgaatgttattctagtctgtttccttgtactttagagaaaccagaaacactttagtggaaaccctctgttatagtctgtcctagaacacatggaggcaagtttttcattcctcttgacattattccctgtgtgattataggaacctgtttggttcctgccgttgttggctcctggagtggcatgtgactactcttaggcagctcctggctcttttctcattttggggttctttggcctagggactggatgccattatgccattgtagtaatgagctcctacctcccatgctggattgcttttcaggagcaaagctgaaggacagctgaacaggtgggcagattaccaacaggtgacttttaaccctggaaggccttcagttagtacttagtctctggatgagattaagccaggagatcaagtatagtctgtgggattaatgagataaccgatcgaacttctggtttgagtgtgaagctgtcggttcatttaggtttctttggttttacagtgttggtgtattggacagagaaggggactacttttggatttggaggatggcctatatataaagcctcagatttcatctcttctcactctgttctagctatcctggtctttttactagttctctaacacaccaactacattcccatgttagaattttttcacttgctgttatttcttttcggaatgctctttccccagatgtttacatggcatgctctgctcatggagagacttcttgggagagccagatactctcccccaatggccctttccctgtgactgtattattttatcattattattactattttgttgttgtcgtggttaaattctcctagatcctgaagcctgcaaccctatccaaaggaagactctaacctgggcagctgtagtcccagctactggggaggctgaggctggaggattgcttaagcccagacgttcaagaccagcttaggcaacatagtctggacaatctatctctaaaaaataaataagtaaaacaaaagaacattccagtctattcctatactctacctttatgattctctgttttttttactccttttatcagtaactgttatactgagattttatttcttccttcttacactagaatgtaagctccaagacagtagacgcttgtcttgctcatcttctagaacagggcttagcaacctcagcattgttgacaatgtagaccagataattcttttttttttttttgagatggagtcccgttctgtcgcccaggctggagcgcagtggcacgatctcagcttactgcaacctccacctcccgggttcaagtgattctcctgcctcagcctcctgagtagctgggattacaggcgcccgccaccatgcttggctgacttttatatttttagtagagacagggtttcaccatgttggccaggttggtcttgaactcctgacctcaagtgatctacccgcctcggcctcccaaagtgttgggattacaggtgtgagccactgcacctgtcctgaccagataattctttgttgtgggcggctgtcttatgcgttggaggatgttgagcagcatccttgttttctattcactagatgccagcagcactccctaccctagttgtgacaaatatgtcaatgacattgtcaatgactctggggaacaaaatccctcctggttgagagccattgttctagaaaaatactttggcactcagtgggtgcttcaatatttattaagtggttaagttgtggatacttaattggatgatggatgcatgagtgcattcagcatattaaaattttttggagcattgaacaacacgtatagccttgtgtttctttctttcctcttttcatagatatctccattcttctgtctgttttctgtttctggcatgttgatccattccttgctgcattttcctccacccagacttgcttgctcttttagacaatgctactcttttttttttttttttcctgagtctcactgttgcccaggctggagtgcagtggcgtgatctcggctcactgcaacaccttcctcccgggttcaagcgattctcctgcctcagcctccagagtagctgggattacaggcgcgcaccaccacacccagctaatttttgtgttttagtagagatggggtttcaccacgttggccaggctggtctcgaactccagaccttaagtgatctgtctgcctcggcctcccaaagtgctgggattacaggcgtgagccaccgtgccctgcctgtgctgctcatttttttttttttttttttgagactgattttcattcttgttgcctaggctggagtgcaatggcacagtctcggctcactgcaacctccacctcctgggttcaacgattctcctgcctcaagcctcccaagtagccaggataacaggcacctgacaccacgcccaaccaatttttgtatttttagtagagatggtttcactatgttggccaggttggtcttgaactcctgacctcaaatgatccgcctgccttagcctcccaaagtgctgggattacaggtgtgagccactgcgcctggctaggcctgtgctactcttatatttacttttgttcaattcagcaagtgactgctgagcagctacggtatgctgtagaataatgagagagaaccctagaaagatatggtactgtctgtgcttaagaactcatttgttggccgggcgtggcgactcatgcctgtaatcccagactttgggaggccgaggtgggcggatcacgacatcagtagttcgagtccagtctggccaacatagtgaaaccccgtctctactaaaaatacaagaaattagccgggtgtggtggtgtgcgcctataatcccagctacttggaaggctgaggcaggagaattgcatgaacctgggaggtggaggaggttgcagtgagccgagatcgtgccattgcactccaacctgggtgacagtgcgatactccgtctcaaaacaaacaaacaaaaacacaaaaacaactcgcttgttaaaatggacataggtgtatgaaatgttcctcgaaaatttaattcttatttcagggttttttttttttttttttttttttttttgagacaggatcttgctctgttgcccaggctagagtgcagtggcacaatctcagctcactgcaacctccagctcccgggttcaagcgattctcctgcttcagcctcccaaggtagctaggattacaggtgcgtgccaccaagcctggctaatttttgtatttttagtagggatggggtttcaccatgttggccaggctagtctcgaactcctgacctcaagtgatccacctgcctcggcctcccaaagtgctgggattacgggcgtgagccaacgcgcctggccttttttttttttactttttttgagacagagtcttactccttcacccaggctggagtgcagtggtgcaatctcagctcactgcagcctccacctcctgggttcaagtgattctcgtgcctcagcctcccgagtagctggagttacaggcgtttgccaccatgcctggctaatttttgtatttttagtagagatggggtttcaccaacttgaccaggctggtctcaaactcctgacctcaagcagtccaccccccttggcctctcaaatgctgggattataggctgagccagtgcacccagcctcaggataatgtttaaattgatactaatgggccaccatagggttaagttagtaattgttaaatacttatcagaatgggtgaaattgctgtcgaatttagaatccagttttaacaaaacctacccattcaatttttacttattttcatttgttgcaattgtctttggtttcttgctgttaattctatttttgtctgaaacctggttgaaaaatatacaaagtggacttggtcattttgaactttttgtttgatgtgaatgttcttggggttggttgttgtattgaaaggttgtgaaaagctgatacatcagtttttttttttaataaaaatttaaaagttatttctttttttttttttttttttttttttttgagactctctgttgcccaggctggagtgctgttgcacaatcttggctcactgcaacttctgcctcccaggttcaagtgattctcgcacttcagcctcccaaatagctgggattataagcacccgccaccgtgcctggctaattttttttataattttagtagagatgggggttccaccatgttggccaggctggtctcaaactcctgacttcaagagatccgtccgcctcggcctcccaaagtgctgggattataggcgtcagccactgtgcctggcctaaaaaatatttcttattaaatagagacaaggtctcactttgttacccaggctggtctctaagcacattcgatccttctgcctcagtctctcaaagtgctgggattgcaggcttgagccataatgccctgcctgactctctttctaccaaacatttatgtttcatctctgatgctgttagagagatttcatttgatttgaactatgggatcagaagaattccattagggaggagtgtctggaatctttttcttttgaagacacaactgtcttctccttagattatctgggagatagagtagtcaaagctgttgtggttttttcagagaggatcctgaaatttgttttacctatctctgtttctttgtattgagaaatggtttattaggatattaagtaattaaacatatattgaagaaataaagatgattttctttttgatatctcagattcctattcatatgactgattcttgtaaggaaggactgggaccttaagattttgctgagtgagggaggtggcctgtttttttaaggtcagtttttttcccttttgggattttgttcagtgctttgatacaaaaactgtaatttactttgtagtcaaaactgagatcaaaggaaagtactgttacctgaggcatgaaaatagaagatagcattaagatttagaatttttcttgattttcgtgtctttttaaaataacttgcaattgaaacctgagttttagagcagcagaatgccatttgaataaaggccccagattgtagtggtaactaggatacctcttagataattttaagtgtacgagaaaagcaagaactaaactggattcttcatttatcacgtgtaaagggtagtagttggtgtctttgtactaaggaagtctcctgtttttaaaatgtaggaatatttggagtgaaacattaggaaattgaatagaaaaataggctttgtctttttaaagatggatagaaggaagcagttttttttttttttgagatggctcttcgctcttgttgcccaggctagagtgcaatggcgcaatcttggctcactgcaacctctgtctgcctcctgggttcaagcggttctcctgcctcagcctcccgagtagctgggattacaggcatgcaccaccatgcccggctaattttgtatgtttggtagagacagggttactccatgttggtcaggctggtcttgaactcctgacctcaggtgatctgcctgcctcggcctcccaaagtgctgggattacaggtgtgagccaccgcaccctgccaggaagcagtttttaaaagtgcattacttgagttttatcaagacttatttctgaattctgtgatgaatttgacatcaggaagatttttttttttttttgagatggagtctcgcactgtcacctgggctggagtgcggtgacgtgaccttggctaactgcaacctccgcctcccgggttcaagcaattctcctgcctcagcctctggagtagctgggactacaggcacctgccaccatgcctggctaattttttgtatttttactagagacagggtttcaccatgttgcccaggctggtctcgatctcctgaccttgtgatctgcccgcctcagccccccagagtgctgggattacaggcctgagccaccctgctggaccggacatcaggaagattttaaataatactctctggtgtttatttttaagatattgactcctgaggatgtgcaaagcgaattttatcatgttttttttttttttttttttttttttttgagacaaagtctcgctctgtcaacccaagctggcgtgcagtggcgcattctcggctcactgcaagctctgcctcccgggttcacgccattcttctgcctcagccttctgagtagctgggactacaggtgcccgctgccatgcccggctaattttttgtatttttgtattttttttttttttttagtagagacagggtttcaccgtgttggacaagatggtctctatctcctgaccttgtgatccgcccacctcggcctcccaaagtgctgggattccaggcgtgagccaccacacccggcctttatcttggtttttaagatggaagggcttaagaaaggaatgagaattactgtgtttccgaacttgaggcagcctcaagatgtttctgaaagtcaaggtctctgaagagcacagatggtgaggtttgtagttctaatttaatagatcagaaaggaaatacttaaaattctgtagagaaccttcttgttcttttctaaatttaatctcaggtttaacctcaagaccattagattcttagctgcacgtggtggtgctcacttgtagtcctatcttctcgggaggctgaggcagaaggatcactggagcccaggagtttgaggttacagtgagctatgatggtgccagtacacgttagctattagattctttttttttttttttttttttttgagtctcgctttgtcacctaggctggagtgcagtggcgcaatctcggctcactgccagctccgcctcctgggttcatgctattctcctgcctcagcctcccgagtagctgggactacaggcgcccgccaccacgcccagctaattttttatgtttcttagtagagacggggtttcactgtgttagccaggatggtctcaatctcctgaccttgtgatccgccctcctcggcctcccaaagtgctgggattacaggcgtgagccactgcgtccagcctattagattcttagtattgcaatagacagtgcttccagaaggctcaaatttgtcctttgattaatcacagttggttagtgaaatttgtctttctgttgtcaaatgttatgaattgttttggttcatttttttttttttttaactcaaagtagttctcaaagcagaccctctgcattggattagcgattataagtctcagtcctaatttgatgtaaacaaaa

SEQ ID NO: 59 - DNA, 168656 bp, Homo sapiens
agtttccttgtctgcaaagtggaggcagtaacagttcctacctcatagggttgtctggagggttcactgtgatgttccatgaaagacaaggcttatcttttgggtttttgtttttgtttgtaatggggtctctgtcacccaggttggagtgcagtggtgcgatcatagctcactgcagccttgacctcctggtctcaagcaatcctaagcaatcctcccacctcagcctccagagtagctgggattataggtgcacgccacaacccctggccaatttgtgtatttttagtagagatggggttttgctatgttggacaggctggtcttgatcttgaactcctggcctcaagtgatctgcctgcctcagcctcccagagtgctgggattacaggtgtgagtcattgcacctggccagcaaggcttatgtttactaagtgactgacacattgtaaacatgaaaaaatactaattcttcatattattgcaatcatcttgagttttgaggtgtttcctttaaaataaaggcgaggctgggtgcggtggctcacgcctgtaatcccagcactttgggaggccgaggtgggcagatcacctgaggtcaggagttcgagaccagcctggccaacatggtgaaaccccatctctataaaaatacaaaaattagccgggcgtaatggtgggcacctgtagtcccagctactcgggaggctgaggcaggagaattgcttgtacctgggaggtggaggttgcagtaagctgagatcacaccactgcactccagcctgggtgacagagtgaaacttcatctcaaaaagaaaaaaaaaattaaattaaaaaaataaaataaaggtgaatcccaatgtagagaattgaaatttttctcttcccctactagagttcatactcagtccctttccttgacttttttggttcccctgttttatgaattccacctgcatggacaacaggcaacatatatgagaatggtttttgggtcagtgttgtttttaaagtcatttagcaaaatggaaaatgaggttttacttggatttccttttttttttttttttttttttttgagacagagttttgctcttgttgcccagactagagtgcaatggcacaatcttggctcaccgcaacctctgcttcctgggttcaagcaattcttctgcctcagcctcccaagtagctgggattacaggcatgtgccaccattcccggctaattttttcttttttttttcttttttgagatgaagtctcactcttgtcacccaggctggagtgcaatgcgagctccacctcctgggttcaagcgattctcctgcctcagcctcccgagtagctgggattacaggggcaggcccagctaatttttatatttttagtagagatggggtttcaccatgttggccaggctggtcttgaactcctgacttcaggcagtctgcccgcctgggcctcccaaagtgctgggattacaggcatgagccaccgcgcccggccaaggggtggaccccgccgtggttccaccgcggctcaaacctaggaccttctgcatgtaaagcagatgtgataactgctacactatagaatcgcatgcttttttttttttttttttttttttttgagatggagtctcattctgtcacccaggctggaatgcagtggcgcgatcttggctcactgcaacctctgtgtcctgggttcaagcaattctctgcctcagcctcctgagtagctgggattacaggcgcccaccaccacgcccgggtaattttttttttttttatacggagtcttgctctgtcacccagcctggagtgcagtggcgcgatcttggctcgtggcaagctccacctcctgggttcacgccattctcctgcctcagcctcccgagtagctgggactacagcgcccaccaccatgcccggctattttttttgtatttttagtagagacagggtttcaccgtgttagccaggatggtctcgatctcctgaccttgtgatccgcctgcctcagcctcccaaagtgctgggattacaggcataagccaccgcgcccggcctacgcccaatttttatacttttagtagagacagggtttcaccatgttggccagggtgatcttgaactcctgacctcatgattcatccgccttggcctcccaaagttctgggattataggcatgagccactgcacccaacctcatgcccggctaattttctatttttagtagagacagggtttcttcatgttggtcaggctggtctcgaactcccgacctcagttgatctgcccacctcggcctcccaaagtgttgggattacatgcgtgcgccaccgcgcccggcgacttggatttccaaagctgctattccttaaggcctcacattatcccaggttcaaagctgcctgctctagacatcattcctgcctctgccacaaacactacccagacacccccaacccctcagcagcctgggggctgagggcatatatttctcaggtccttgagcctagtaatcttgggctcatggtgtcaggaggatgccaggtcccctcactgatcttgccttccttgctctccacccctgacccctagtaaactgcatggttggttcaggaaggggaagccatgtcatgatcacagcctgctccatctcccccaccccagggcttctttcgccgcacaatccagaagaacctccatcccacctattcctgcaaatatgacagctgctgtgtcattgacaagatcacccgcaatcagtgccagctgtgccgcttcaagaagtgcatcgccgtgggcatggccatggactgtaaggggcccaggtggagggaatagagccaggtggcctggggtggggatgagttctgggagggcagcttccttccagggtaccctcagagcccacagggcagagtggcaatccagtctaggtcagaatgttcagtgtcttggtccttgctgtcctccttcctgcgcaaaaggaaacaggatccctgtgtgggccccaatgcctacctgccttacaacactcgagggccttagagagggagtcgtttggtagaaagagctcctgggcacccactctagcacactgttcttgactcccagcgaaggcaccccacttctagatgagacagggcatcttccattggctggggattgggtggcaggatattcgagtaaccaccgtcaccataatccgttagaccagaacatgatattcatctggatcagcccaaactgttgttgacatggtcccggggattaatcatgatccgggttgtgctgcccaactgctaggtgatttgggaagtcatttagcctccatggccctcggtttctccaacctgtactctaggaagagtagtttccgggagcattatggaaaggggatggagggtgccatgcgttagaccttgtgcctctctgttcacagtggttctagatgactcgaagcgggtggccaagcgtaagctgattgagcagaaccgggagcggcggcggaaggaggagatgatccgatcactgcagcagcgaccagagcccactcctgaagagtgggatctgatccacattgccacagaggcccatcgcagcaccaatgcccagggcagccattggaaacagaggcggaaattcctggtaaggagaaagggggcatggggagagcagtagccaggtggcagggagaagagagtgagctcggagtcttgcctcctccaggaagtcttcttagtgtaatccaacccaaaatacatactcttcacacttttgctgtccagattttatacacttgtgtttgtgtccttgctgtctggactgtctactccatccaactgggagctcaatgaggacagggccttgccttcctcatcgaatttccagggagcgggagcgacctttcttctttttcctgcccttagtgactgggaggagagggtaaggatacagttatgtcacagtatttttgagcacctgctgggtgccaggcattatgttaggccctggtcaagctagttgctaagtaaatgatgagtttgggaccaggtgcagtggctcatgcctgtaatcccagcaatttgtgagaccaaggtgggaggatcgcttgagcccaggagtttgagaccagtctgggtaacatacagagatcccacctctatgaataattttttttttttttgatacggagtctcactctcacccaggctagagtgcagtggcacgatctcggctcaccgcaacctccgcctcctgggttcaagcgattctcccgcctccgtctcccgagtagttgggattacaggcactggccaccatgcctggctaatttttgtgtttttagtagagacagggtttcaccatgttgaccaggctggtctcgaactcctgacctcaagtgatccacccgcctcggcctcccaaagtgctgtgattacaagatgtgagccaccatgcccaccctctatgaataatttttttttttttttgagttggagtttcgctcttgttgtccaggctggagtgcagtggcacagtcttggctcaccgcaacctctacctcccggcttcaagcgattctcctgcctcagcttcccaaatagctgggattacaggcgtgcgccaccacgcccggctaattttgtatttttagtagagacggtgtttctccatgttggtcaggcttgtctgaactcgcaacctcaggtgatctgcctgccttggcctcccaaagtgctgggattacaggtgtgagctactgctcccggcctctctacgaataattttaaaattagctgggcatgggggtgtgtgcctgtggtcccagctactcgggaggctgaggcaggaggatcccctaagcctgggaggtcgaggctgcagtaagccatgattacaccgctgcactccagcccaggcaacagagcaagaccctctctcaaaaaatatgatcagtttgggaggagatggacagttggctatacgtggtgaaggaaggcagaaaaccagcacctggttcatggtggagcatgccggggggtggcacagtgcacactgttaagggcacgggctctgattccaagcagatgtgtaacagtcacgagtcagactgcccaagttcaaaccctggtcctaccacttgctggtcatatgactttaaccttattatttagctgccccatgcctcagtttccacatctgtgaaatggtgattattataattattccttttaggattatggtcaggatgaaataagacatgtaaaacatgtagcctgatgcctgatcatatattaagtattcagtcattatagctgctactactgttactaccgttgttattattagctgacttggagctctggttctggtctattctctgctcaagatgaaggaaaagctttgggcctgggactcaggcacgggcggcccctcttccccaagctgccttggagctccccctggtgggcagggagcctcagtgagaggctgaaaggggtctgcggccccagctgacccccgtctttctctctagcccgatgacattggccagtcacccattgtctccatgccggacggagacaaggtggacctggaagccttcagcgagtttaccaagatcatcaccccggccatcacccgtgtggtggactttgccaaaaaactgcccatgttctccgaggtgagtggcagaagtggggagagatgtgatgctgtgctggagggaaacctgctcccccggtcacccagtacaggctcatctgaggttctctggacaaggagcaattcctgtaggtcaacatacacagataacatacacagacacacacacacacatgcatacacatacacccagcacacaggcacacatgcagacacatacacggacacacacacacacctagcatacagatacgtacacagacacacatacacacacacatacacccagcacacagacacacacacacctagtacacaaacacacacacagatacatagaaacacacacagacatatacacccagcacacagacacacacacacacacagacacacacccagcacacaggcacacacacacacacacctagcacacagccacacagatacatagacacacacacacagatacagacacacacacacacacagacatatacacctagcacacagacacacagatacatagacacacacctagcacacagacacacacacacagacacacccagcacacaggcacacacacacacacacacctagcagacacacacatagatacatacagacacacacacaaacacacaggcacacacacacagcatacagacacacgccaaggtctggctgctctaagaaatcagccggctccaagtgctcccctccacagcccctcatccttcaagtctatgcggccacccaactccaggcagcctgaaagttctcattttccagagcactagtgctggagacaggctgccctactagccatgtgacctggggtaagttacctccatcccctgtgcctcagtgttcccatctggagtgggctggggataatgatgggtgctaactcacaggcataatttttttttcttttttgagacagattttcgttctgtcacccaggctggagtgcagtgacgcgatctgggctcactgcaacctccgcctcctgagttcaagcaattctcctgccttagcctcctgagtagctgggactacaggcatgtgccaccacgcccaactaattttgtatttttagtagagatgggtttcaccatgtatgttggccaggctggtctcgaactcctgacctcaagtgatccacccgccttggcctcccatagtgctggcattatagtcgtgagccactgcgccgggcctcacaggcataactgtgaggcttaaatggaatagggcatgcacatggcccaatacaaggtcagccgttcagagtccatgggggccttgcgggcctcacggctcccgtaggacactctaggggagactcaaggacgcggggaggggtatgctgagtgctcctgtggccctgccgctccacagctgccttgcgaagaccagatcatcctcctgaaggggtgctgcatggagatcatgtccctgcgggcggctgtccgctacgaccctgagagcgacaccctgacgctgagtggggagatggctgtcaagcgggagcagctcaagaatggcggcctgggcgtagtctccgacgccatctttgaactgggcaagtcactctctgcctttaacctggatgacacggaagtggctctgctgcaggctgtgctgctaatgtcaacaggtacctgctgattagtcgggagggctcagaagcttccaggggtcccagagattggctggaccctgggcctgttgctcaactccctcctgaatcttcttctgggctacctctctgtcacctgggccatcccctatcccctgttccttgctctgtcacacacttctcactcgttccccaggcccatcccttgcctccccatccctgctctgtgccttttcctgtctttgtctccttccttctcgctgccctgtccctctgtcactcacattcccctttgttccccactccccactttgttctcagccaccttccatcccctcatccctcctctgtctcccagtcccatctcttacccctcagtcccctccctaaccccatctgcaccccgcctctctgaccaccaacctcagtcctccccactccaaggctcctctctctcccccagcccccggcctgtccctctgtcctccttgcattgccccctccccccagtacccccctgcccctctccacttcccagctgcctccctctccctgtgcttctcctgtccacgtctctcagggggagcttctcccctcccctcccccagcctctctgcctctatctcccctctagtcctttcttcccacgtccccacacctcaccctccccatctccaggccttcggccagcccctcgcccctcacgcccctcttccctcacagaccgctcgggcctgctgtgtgtggacaagatcgagaagagtcaggaggcgtacctgctggcgttcgagcactacgtcaaccaccgcaaacacaacattccgcacttctggcccaagctgctgatgaaggtgactgacctccgcatgatcggggcctgccacgccagccgcttcctccacatgaaagtcgagtgccccaccgaactcttccccccactcttcctcgaggtctttgaggatcaggaagtctaaagcctcaggcggccagagggtgtgcggagctggtggggaggagcctggagagaaggggcagagctgggggctgagggagacccccccacaccccttctctccttcctctcgtccttggatagattcagctcccacacacacacccgcactgcccaggtccctcctcagacctccagccctgggacagggcaaacaactgaacttgctatggaaaggacagtgtgggaggctgggggagctgtgtcctgcagttcccaggaccccatcctctcagaaggtaggggaagggcgggaggattgagaagggacaagccaccttgaccgtaggggaaggaggaatgtgggctgggggaagatgccctcaactcaccccctacacacacatgagagagagcccccacccagttccttggcctaggtctcccctccaggctgagggcctctctacttccccagatgcctgggtgcaaagaacggcttggcttggctcctcctctggaggttaaaatttatagtcattctaactgcactttggaaaccaagcaaggggagaagacaaatgaagaaaaactagacagagagaaaaatacaaaaaagagagagcgagcgatagagagagatgatattaagttattaactgaggctgaccagaggggaggaccccccctttaccaccccatgcactttgcgagctgccccttcttcccccacatcagagagaaatgcccccacaccagagccccaagggtagggctgccgatcagagctgtgagttaacacaacagggtcctggccaccccccttgccataccccgccctctgtgcccctttggcaccccccaaccctagtatgtcctctgctttctgccactcgtgcccgctgagttccatctacctctcatgctggatgccagctggcccctcaccagcctgccctgctgcccacacagctcccctttaagtgcccagccctaggggcctctccccatccacctcctccttccacaccttggcacccacccaggaaaaaactgtggctccaactcctaccctccttatatcctgcagtattagctagaaaccggatgctgctgcattggttgggtcgggggtaggagggctgtgcgtgagcgtctcccagaaccctccacccctttagcactctgtttccctgtttcccatctgtcttctgggctctctctaacctctgccctcctccccagctcctactcactgcactaactctgggcgggcaggtaccagaatgggggtgtttagataagtgacacttagttggggccccaggggaggggtggtcggtgctcctttttctttaaagctcttttggccagctgcccctctgccccgggaccccttcccctcttcttttctctaattcagggactttggcttgagcccctctcgccctcctggtgagggtgctctgttggtctgcacttgggtgagctgtcctcctccccctccctgtggctgccgcccactcctcaggggagagagggagagaggaggtggtcctcccatgggagcaggaggtggggtgggacagagcagaccagagggtgctgggctcagggctgcatgtcggcagggatggatgggtggacacagatgcccccggaagccatggggattggggcagggggtggggggaggggtgccagggcttcctgcgctttgcactattggggcaaaaatgtcttaagcagtggggaacctgccaccccaccctgaccctcagcctgccacagccccctacacacacacacacacacacacacacacacacacacacacggacatgcacacacggacatgggaaggcaatgctatgctgcccgtcagggcactgtccttccccaatcgttcaggtgttccaacaggggtggagggcctggaggagcacccgctgtcacctgtgcatgtgcctgtcccaccctgctggggcctcgggctgcccgcgctgtctttgtctctatcctctctctctctcctggagtactgaatcctgtattactccagtcccatgggtaggccctcttgtaccttcctaccacgcctgggggcccagtggaattcctgacctgtctgctgtcttccccatccctccatccccaccccaacccctccatccccattctcagccatggacacggcagagaaaaggccttgaagagccttagcctcttataggcacttgggactcccccaccctccccaatcatatgagctgtgatcccatcctccccggacccctcccttccccctcggtgatgtggggtgtatgtgtgcgttcctctgcgtgaatgtgtgagtgagtacacatggtaggggaggagccagggcgactcaggagtgccacgcacctgctctagagcggcagctgtcccagtccctgctgtggaagtgggggacagggccctctcctgggggccattggtgctaatgagggggatggccttgatgtgggtgctcagcatgcctcccccagtattggcccggggcactagggcaggcagggtggagcagcaggtgcagtatcggtgggaggacgggttgctgggaataggacgagggggccaggccaggacaaggggttgccagagccatgaccactaccccgcccccaccacccgcctctccatctcagtattgcccctcccatcactcataacacacatacctcatccagcctcctccctgctcagacttggggagggtgggggaggagcccctaccccttctcctggtggcgggtctgcagggctgggagagggcagggcgttgtgagagagagaccgtccataaggaggacagtaactcctgccctgggaactcctgggcgggggggagggggacactgcccagaggcgctactgaatgtatgagaagctggtgctgggctggggggaggggggttgtggccagaaacagggaaggaggtaggtctcttccccagggaggggtgggaccggcaggggtgacttgaggggctcctactcctgccccacgttgacaatcagtatgtctgttatgtgcgatttttcaccccgttgtgttttgggtcaggattttaaagaaagatatttttatggtaattgttgctcgtctattttactatatatttatgtaataaatatatgatgaaaataacccccttgggcaccccccttagacttgtgtgctgtttccctatatcctcccatctgctggcagagtacccaccccacaaactgaccagatggagaggtggccccccccagccttggcagtatttccaccccaccccccaaacgagcacacaccacagaagccagctcagctgtgaactattggatttgagacaggaacagaacaaatcagagggccaggggagggttgtgggggagacagagtggtttaaataggggaggaggggaagttcggtgatgggggagggaggcaggtatttacaagaaggctcagggggccagaggctcatcttggaatattttataacaatataaataagattctggtttgcttttccttttcgtctcgtaaaggagagagaagtgcagagttcgattctgtacaagggggcagcggcagaaggccggccgggcgggtcactgggcgtccacccggaaggacagcagcttctcggaatgcatgttgttcagggtccgcaggtccggcagcttgagcagcagcttggtgaagcgggaagtctccaagggccggttcttcagcaccagagcccgaagagcccgcagcagcgtctcctggagctgctccaccgaagcggaattctccatgcccgagcggtctgtggggaagacgacagcagtgaggcggactccccgagctcctctgaggaggaaccggaggtctgcgaggacctggcaggcaatgcagcctctccctgaagccccccagaaggccgatggggaaggagaaggagtgccataccttctcccaggcctctgccccaagagcaggaggtgcctgaaagctgggagcgtgggctcagcagggctggtcacctcccatcccgtaagaccaccttcccttcctcagcaggccaaacatggccagactcccttgctttttgctgtgtagttccctctgcctgggatgcccttccccctttctctgcctggcaacatcttacttgtcctttgaggccccaactcaagtgtcacctccttccccagctcccccaggcagaaatagttgtctgtgcttccttggttcatgcttctactgtgacacttatctcactgttttataattagtcgggcatgagtctgtttcccaagctagactgtgtctgaatcatgtctgtatccccagtgcccggtgcagggcctggcatagagtaggtactccataaaaggtgtgttgaattgaactgcgtctgcctcctcccccgggtcaggcgagagcctgacctacctgcagagacaagcaccaccgcggtgaagaggcccagctcctcctcggtaagcgccagggagttgagcttctcgctgaagtcgaacatggcactgagcaggtctcccatgcccatggcaccaagctcctgcaggctgtaggtggtgcggcttaggaacatcactgtctggtccttcacgttgaacaacgaagcaaagcgcaccatcagcacctaggagggaaggggaacagtcatcctgggtgtggtgggaggagcactgaccaaatcgcccctgtagtttgccagagggtttagcggtgctgccttcgatttctcagtagagtgggggttgtttctgaatggccaatgagggagcccaggtggaaggatggctttgggatccaataagcctgaatctgagtgtcagctttgtcactacctgtgaccttgggcaaggcattcaccaaagttaatctgctcttgtctagaatgggggcagcagtgcacccaaggcattatttcagtgtaatgggttgtgattaaattccagctgagatgacagaagtcccagccatcaagaggaagcagcaggagccgctcagcccctttcaccaatcaggctataaggacaaagatactgggttccaaaacctttcagaggtcctgcccaccccagacagcagggctttctgttggatccttcccaaggtcaaaagcaggaagcgtctgggtgcaatggctcacgcctgtaatcccaatactttgggagtccaaggcgggcagatcacctggggtcaggagtttgagaccagcctggccaacatggcgaaaccctgtctctaataaaaatataaaaattagccaagcgtggtggcgggaacctgtaatcccagctacttggaaggctgaggtaggagaattgcttgaacccaggaggtggaggttgcagtgagtggagatcgcaccattgcactccagcctgggcgacaagcgaaactctgtctcaaaaaaaacaaaaaccagaagcataaacggtcactcacctcaaaggtgccagccttaagcagggtgacttggtcatgctgagaaaggtcacggaagcccgggatgtgtttggcaaactctaccacctcccgcacagcgggcgtgaagctcatggagaaatcctcccagatctcctgcaccgttcgcccactgcgtccatgcgggtacatgttcataggacatgcctgggggaggaaaagattgaaggaggggagtgtcagccaggctgggtcagatggacgccccgagcagagctggaccccagattctgcctgggctaggggctgtggccctgaaggatgggtctttcagataaagtagcaattaggtgccaggtggagattagggattcccaggcagagtccagactgcaaggcaagacattttctcctgggaagatgctatccccacactcagcctccaggaacccccagctgccctacactaagtccattctgccaggcccccccaatcttcttaacgcactcgcccgcccccatgcccttaccagcagaacattctttgagttgccctgccggggactgttggcaggtgccttgccttctggggctgcatacacgtgggtggggcatagacggtgcccgttgctgttggactggtggcagctgtggtgtgcagggccaggaggccaggtgggagggtaggaggagggagcctggcgcagaccatttagggcctcgttatgacgctgggcagccaaggtgttgttgtcattgggggcaggtgggcagccctgattttcccagcgatgtggggtggtggctggagggctacctgatgcatggttggcattgaagttgccaggtgagctgcccagcttgtcatgggcgtaggtgaagatctctcgatgggcccgggccacctgggatatcacatcctccactgtgggctcagggcttggggatctgggaggcgtcagctgttgtggaaactgggagaagcccaccaggggtgaggggaccggagcagggggtggcgaggggcccatggggcctggggtggggtgctgggtgggtgaagtctccagcgggcactggctgctcaactggttgttggccaggttcatggcactctgcatctcagcaagcatccgctgcttctctcgtttggggatgcgcccaaaacgcacagctgcaacaggatgagaacagcatcaggaagttctcaaccatgctcacgtgcttctcttccttccttcctcctgaaagggcaaggccctgaaggcttggggtttcacatcaaaactaaaaccagcaagtccccacccatcaagggggtttccctaggagggattgctggtaggaggtgacccgagggaccaatgggatagaagtatatgttgacccaagcaaatgaaggatggacatcccctggcacatgtgattcacagtatgatgtgtctccatttgtgacttttttaaagggaaggattaattcagaaactttgggcggaagaaggggggaggatgtggggatgctgcctcaccgtctcgagacatgcccacagagagacacttcttgaagcgacattgctggcagcggttgcgattgatgcggacgatggagcaattctcattcttcagacaccttttgtactggatgttctgctggatgctccgacggaaaaagccctggagggcaggggtggttagtgaccacctccatcatggctgggcctctgtgtccagggggagggggccacctgcccctgcccttacccccagtccgcctcaccttgcagccctcgcaggcgtgcacaccgtagtggaagcccgaggcaacgtccccacacactttacacagtaacaccatgccattcagctctgtggaagagacgggcagcaggtgagcaggagaggccaggctgagtggccacaggtgtggaggctttctgggccggagatccagggagggaaaagctaaggaggaactccagtgttgaggggcactggagtgacaaaactgggctgaagaggggctggtgccactctaggagaaatccctgaagccagaataggtcctggcaagactggtgtcacgtaaaaacccattcccaatctggccctggcctgcttcccttcccccgaatcagctggaaaggtactcactggtgatgttgctggtgctcttgctgggggacactcggctgctgtcctccatggccacttgtagactcccaggggggctcccattatagaaggaggaggaggatgacgacgaggaagatgaggaagaaggggagccgtcatcactcaggctgggtggaatgctcccaaaggagcgagccgggtcttgggtgagggagccagtgggggatggtgggaagtaggtgggacagccttgggtcagggactggaagctgccattggagttgtcactatagagggattcagggctggtgcggcttggggaggagccactggagccaatgtaggtgatgacgccacctggagagagaacaaaaggaaagggggtgtcagccgccatgtctccggacctagggtgccactgtgctcatccccacctgtctgcccaaaacattgctggccactcagttcaccatgtggagcccctaatcttggagttaataagcaattccccaacacacagtagacatggcatggccaagcaacacctacgaccctttgcaggccaccttcagcttctgctttcagtatgaggcatgacccctgtggcatctcgcatatgtgccccccttccttagttgccttccttgggaatatcgactgcagctaatgacttagttgtcagttgaagatctggggatgggatgggcagctgagcaccattcaaagtgcccagtcctccaaaaacaaaaacccagctgctgattttaacactaagaccattccaggaatgagaccatggaccatggagagataggtagccaacagtaaagagaatggagggtttacaaaagtaagacagtcacattccccccagttggggacatatattctctgaaggaaatgaagggaaggaatctgcccagcctggttcccctggcctcttaagagagtgagccacagtggagtctatccctgtgtccaaaaaggacttcgaggtgcgagttgcaggaggtggaagtacaaactgtccagcctggggctctaaaattcccccttcagatctcagcctggtaacaatgaccttggctctctggccattcagggactttgaccctctggttacattgccaatgaggtggctgtgctcccgtggtattagcaggagaaaaaggtgacctgcctgccacacctccggcaagcacctagattggtctgccatgggcggggtgggagaagggaggatcccaggacacatgtgacctaacacatgccatgccactgtgtctgcagaggcacatgtcttgctcacccactgacacacactgaactgggcagggcggccctaaaatagctcaaggttggtcagggtgaacccagctccttggaaaatagttgcacaacagatcagctcccccggtttcagggctgaggtgggggatggaatcattagttggcagtaaatgaagttgacctagttcacccatcccccaaaaaggagtgagaccttcatgcagaggcttccaacgtggaagtgaggagcatactcaagagtctaggtctaggtctagacccatcactaccaacttattttgtgacctagaggacatcaactcccctctttgggtctcagttttcctttctgtgagaaaaaaaggacagtatcatttcagctatgattgtggggtgcagttgctttggggagcccttagtaggcaaactgcagcttgtctggtggagatgggggtaagacaatgctcgcagaactaaggagagagaagcttggggaacaggaatttgtaatgtggggaagctgagtctaaatgcagtacggtgaagtaggtgcaaataagagtgaagtggaaaggagtgagaagggtggttaggggtgaggtctctttagggagtgtaaaacagaaggccatgaaaggtcaggaatggctccatgttactttgttttggtgatgggggagggggccgggcaggcggaccggaaaaggaggcaggcgggggcggtgagtcagcccagcttcacccagatctcggcggggcggggcagggcgggagctgggccctcagccggcctcacgtccctgctccacgtgtgcctctcgcacgtggctccccaacgaggaaccccggaactcgaggccccgccctcctcgcttcccgtcaatcgagagcagtcgccccgcctcctacccgcccttccccggccaccaggtcgtgggctggaccccgaacgatagcagggccaggacaacctaggggaggagagaagggaacacgcgttgccggggcgaccgggggggcggagctcattatgtaacgaggccgggaggcaacgaccaatggggtggcagccacggcttctgctgaatgaaaacaaacgcagcacgtgggcccggctctagagccatgtgagccctcccggcggccggagccctgtaggtgccctccctcgggccgggcaccacgctctggactcctcaagtgtcgctccctcctgtcactgaggattccccagtgagatccgaacgattctcccagcccctccttccctgaaccccatcgcgccactcttctcagattccctcgcgcctgcaggaactagaggagggggaagacaagaggggagggggtccgttttctgaggccaggcatactacagctgcaggtagtggacagatggggccgtttcggggcactgttccaaagctcccagtccccctaaattcttcgcttcaccacccgtacctcctctccatttcctcctgcccagggattcgaggctcaagggagctttgggactctgaggggtggtgatggggcgtttctgagagcatttccagcccgaacaagccgctctggaaatcccacactaaagcaccgcagcacgttagcaaatctccgggccgagggacaccccagtcccttacaaagttcctctttttataaggcgtagatggaggtggggagacagtgacagggaaaagatgatagtaaagaaatctcagtacctgtgttgttgttggagtccagggtcgtcatgtcttcaccagctgagagcggtcattcaaactggaccttgactcaaactagaggttgcgatcgccgctgttgccccctgggcactggctaagggcggggagtggaccccgcgactcacgatcaggatccgaagcaccctgcagcaaggtcttggggtggccggactgcagccctgcagaagggttggacgttgaggcaacggagttctgctttgcatgggaagagcagagagagtgtgtagggggaatcagcctgcagtagttctggctagaaggtagcaaggagggtcgggtctctgcagtgtacggggtgcctctgcctgccggctccgcagcgctgcggggtggcgaatctggagctcccggtgcaaaagtcccagaggaagagaggttgcaaccaggaagtaagtaggtgatggggagaaacggggcaccgagtcgcaaagaggcgagacgtgtgccctgctacgttccctcggcagtaatatttcactctgccaatctcagccgccttttgcccgagcctttccctgggacagagggctctgcgcaggcgccagcagcccagggttcccgggccgcacgcggcactggagcaggtaccatgtgatcccagggagcgcctcgtgccccagtgacacacttttccaacagccggcacgttgagctcttgcgcgcctgcgcaacgacaagactgtcgggatttgtagtccaccgacaaagtgggcggactgcgtgcctttcccctttctgcctggcaaagcgcttgccgggacctgggaggagctgagagtggggtggggtggggtgcgctgaagagtcagggtggcgtgtttagaaagcctgtatggcaggggcatgtgaatttctggggagggactggcaagcttgtttgctgtctgggagatcaaagctaagaggccctttctgcaaaccttgcaaacgtgagggcttcacgtgattgcaggactgacctcgtcctgaggttactggtgaccgggagagagagaagccggggagggagatttccctggagtcaggagcttaggctgccctctgcttcagggcaaagtccagagaaggaaaggaaatgtgaccccctttcccttctactcgccttagggagaacacctccaggggaaggagttcccacagaggtagggatgtctgtagggactccctgtttgcttgtatgacaccattccacccactccagttgactttggggtgagtcatttccctttgtctgggaaataaaaaggacaacagaggggaactaatagtgaaagtgctttgaggtcctaaagtaatggggaagaggtgaggcagggggtgggggcagagtgacacccctgcccctcggtgctggaggataaaatatgaattccacagaagattactactcagaggggaacatgtagatcatcttaagcctccctctttttactagtggggaacaggaagcttaggagaagtgaccgacccaaggtcagacgtccattgctagtttcatctgcccaccccgaatgggaaggtgggtagatgtacaagtgaaatactgaacaggggttagaaacagccagcattgccgggtgctttggctcatgcctgtaatcccagcactttgtgaggctgaggtgggttgatcacctgaggtcaggagtttgagaccagcctgaccaacacggtgaaaccacgtctctactaaaaatacaaaaattagccggatgtggtggtgggtgcctgtaatcccagctagtcaggaggctgaggcaggagaatcgctagaacccgggaggtggaggttgcagtgagccgagatcgccattgcactccggcctgggggatagagtgagactctgtctccaaaacaaacaaacaaaaaacagccagtatttcgcttcagagcagcaactgtcccatgagtaataacagatctcaagtagaggagatctatcatgttagagggcttgggtcatggaggggatggaagcttcttaggcagcgaagggagagggagcctgagccacctgctgctcccgctaattcctccccagtcccagtgcttctagagagggttttcttcacataggaagcccttctccacaggcagctcctgggatggtattgatggatgcctgggaaacatgaaagccaccgaaaaggtagagaaaaagaatatgggagtccgggggtggtggctgacacctgtaatcccagcattttgggaggctgaagtgggcagatcacctgaggtcaggagttcgagaccagcctggccaacatggtgaaaccccatctctactaaaaatacaaaaattagctgggcgtggtggcgcacgcctgtagtcccagccactcgggaggctgaggcaggagaattgcttgaacccaggagatggagattgcagtgagccgagatcatgccactgcacaacagcctgggcaacagggtgagagtccatctcaaagaaaaaaaaaaaaggccaagtgtggtggtggctcacacctgtaatcccagcacttggggaggccgaggcaggtggatcacccgaggtcaggagtttgagaccagcctggccaacatggagaaacctcgtctctactaaaaatacaaaaattagctgggcgtggtggcgcacgcctgtagtcccagctactctactcgggaggctgaggcaggagaattgcttgaacccgggaggcagaggttgcagtgacctgagatcgcgccagtgcactccagcatgggcaacaagaccgaaactccatctcaaaaaaagaaaaaaaaaaaaagaataataatatgagcacaggagtaaactgggtagtgaggacagtgaggttgactgcaggagcttgaccactcaccctctgactccttgtagaagatgagcttcctggaatgggctaggctttagctttgttctcctgctcccaagaaaagtgggagagagagggcagtgggctcttctctggccctttggcccagagttgggaagctgcagcagagtgtgggagcaactgggaggggctaaaacaaacaaggaaagaggcttttcaggaaaacttggttctcagcctccaccccctctccctccaccctctgggctctggagggaaagctaggaggtgaattgccctgtcctgcccttgcctgctctctgtgaccttgactccaagtcagagccagggccagagcccaggtgtctgtcagggctggactcaaaatcaggacccctggcgtgcatctagctccccacagcacagcaccaccactagcaccctccctttacttggccggggtcctccccaaggcccacagctctgtttgctgctgtggaggtcctacccaccccctgtatacttgctggatgtttgttcttctaggagtgggagctggggtgggtcaagactcctcgcctgctgcaatcagtgagaaggaggagggagcagaggtagagagagctgaaattcagtcagcctgactctcctcttggcaaaacctgggtggttctgcagtctgtgtgtggtgtgaaggcagaggctgggagggagggggcaaaggagaggggttacccccttgctccttccttccttcctttccatttcttatagggcccttccttttctccctcacaagtaattcgggtgtctttcttctacagctggtgagaggagtacagaatgaaaaggcagggttctctcttggccccagaagcttctagtcagtctgtgtaccctgctcctttctctgtcagcagctgctgggagaagggcagaaactctgagacccaaagccaccaaagggaggggggaaaggctgggttgtctggctctgggtgattcggagtagaatcttggtttctctttgacctcaaccttggctgtaagaccttaagacaacaggtgtatctcaacacaaccttcctcacctatccctccagctggacattgctgttcacttctttttttttttgagacagagtcccactctatcgcccaggctggagtgcagtggctcactgcaacctccaccttccgggtttaagccattctcctgtctcagcgtcccaagttgctgggactgcaggagcacgccacaatgcctggctaattttttttatatttttagtagagatggggtttcaccatattagtcaggctggtcttgaactcctgacctaaggtgatccacccacctcagcctcccaaagtgctgggatagcaggcgtgagccaccatgcccggcctgctgttcacttctacacacacacacacacaccccatttctcccatagcccagttcaactcaagaaagcacttaactcttcataaatagtactcagattggatccaggtagaaaagatgcatattcacaacctggtacagcaaggcactgccctggttctgcatacacttccacttggattcccaagtctgggattctggggacgaaccttcccattaggggcagtgttggatcctgcctgtgtgtttccaaatatgtctttaattttccttgatttatttggactgcagaggacagcagacacagaggagaagaaggaaaggtattgagaacactaagctctggtcagttatgtatgtgtgcacgtgtgtgtgtgtgtgtgtgtgattctatgactatgagtgagactgcatgtttgtgtgtgagtgtgaatgctgtgtgtgtgggtgtgcatgtttgatctgagatctgttctccctgtcagtaggttgttctgggtaacagggcaacaccctgtgcaaattctgggtggcctaaatcttgggccaactgcttgactgactgactgactgactgactgactgactgagggtgggtccttgctggaaacaggtcaggcttctgtagatgccttcccatccccctcctttctcaccaagaaaccattgcccagagtagaaacctgtctgcccaggtgatgcaaacctggtatagaaatgctggggatgcccctgaatcagggaaccagccatgtgcctgggagagactcactccctgccctcctaaatccttttctttgtctctaaaaggccagctatctttcccaaccccacccaaagcctggatgttttggggagaactttaagaacatgccacaggaaggacagagtctgagctaacttgtttctcagtgtggtggggggagggggatggagaaagcaagggcgaggcatgagccagggctgggttccatggatgtgttttgcctcagattctatctttacctcactactgctttttccaaggaaaggaaaccataaatatgtattaagtaccaaccgtatgccaggcactgtgcaaagtgttttgtacacattatctcatttaatattcacaacaaccctatgctgtaggtctcattcttattttagagatggggaaactgagacttagagaactttattaacttgcccagggtgccagagggtctaggtgattagtcttgaagctgtaatttgcatagcacttaagactgagaagatgtccatcaaagaatgatagcgcggatggagattattggaggggctaaatctcccctctagctatctcttgaactaccactgtcagcgtcacaatgaaaatggcaatgctggggattcaaccccaggcgtgaagatgaaactctttctgctagcaagactgcccctcctagagagattactgccaccctaggggaacgtctgagcagcaaactcatcctggtgtttcccaagcaatggtgatgcttggaagtgggatatatcaccaagaacagaagcctgaagcaccccttgtccctgtcccagggagtacctcagctttccaaaatctctcttttaaccccaggcacatttcctcttcccctaaactcttcccactccccgtcctacatttccctcatctggttctaaaagtagaaggggcaggaacagggtgcacaaaccacagactgctatagaggtgactaacagaaacaggcgtctgaactctcttctctacccaaaccctctgaatttggggtctgctgctggtggtgaggagagtggggcaagtaggtcagggccctctgaagtcccatggtgcttcattccaggagctgtattaagaagattggttgagggagcgtgtggaaggccaccaaggaccaacaaaagttgtgtccaaagccttaaggaaacagcatcccacttccccatttacctgcttgagcaacgtgcacctctaaaaccagcccttccgaaagccactgtcctgggccaatgcttcttcagcagatgctttgaagaacctgaagaagggtcccctctctcagaacctaggatctcacccacatcacaggatcctggaggaggcatggattgtccttggcagtggagactaagccccagatgaccctttttctggcatccagtacatgctctgctaaggcctcctgtccaatctttgccatgctgctggagccacagtggtatcatcttccaggcccctgcacctgcccattggctgcccttgagcctctgtagaactcagatgcagggagaatgtgggggaggtggaggaaagggagagggggtgctctgcatctgcttccatctctaccctttatcccaagctccatctcaaaccctctccttatccagtgtctctccatcctttgggcctctgcagatcaccattagctgcctggggaggccagaggctcatgacagtcctcgtgagcagaatggacctcggaggagcggtggcctgggcaggcattaggggccttgtgtagcttctgggaggcttacataaacactggctgggatggggaggaaaggggggttgcaatggctgcccagggaaaaaagcaacccccgcccggccggctcagcctgagtggaaagaaggaacaaggcttactttccctcctctcactcctctcccctggtctgcagctgttagtcgggctggaaagactgcggtatcttgggggagggggggcaggagaaggagagagagaggatgcgacttcacaaatttgggatccctcctcctcttctaaattggggggagggcgagtggggaagaagcagtttgccaaagagattttcaatgccgcaggaaggagctttggctcattagaatgcgcagtttgcaccctggaaaaaaaaaatctgtgctggttgcaaaaatgcagacgtgtgtaggggcccagcggagattaaaaaaaaaaaaaaaaagcgctagctctgcaatgcaggatctgcgaagttttggtgcgatgaggaaatgtgggtcgtgctcatttcatttgcttgttcctgctaacctactgtccccctgactctagcatagtctcatagcccagcaagaggcaccgcagcttagaaatggggtcacgagtagggggcagaagcagagagccagaagtgggggtctgtggttagagtgcccagagaaggaccaatggaggttagagggccaggcagatggaagggggcacttcaatgagggatggaggctgaatttgccttttgcacacgcatttgttctgcagctacacaggggttattgggaaagcccttctaggtttcctccagccctcggctcttccccatctccaagtagcagagggactttccccttccggtccactaacctcacagaccactgttgcagaacctttgcttcatgtccccaaacacacaaatccctgaactgtccttgttctaaccctggagggggcacttgctgcgtgtgtgtgtcatcctccttcctagaaagaggggacagggtagcctgatttggggagcccaggctacagggaagccaagtcttggctctgggcagacatcaacacatcaccatgagggctggggtgggctgttctgtgttcttggcttgggaaggtcctttgttcttttgaggcttagggttctgggttgtgaaaacaccaaggggctgcctgggaggaaaatatgcttggggagaccatgtttcttttctgggtgtttgctcccctggtggctcaggagagacaaaaggagacagaagcaggataaagcgcaaggagacaagaagggagccccgcgcgctttccctccttcctcatcttgcctcctgtttctctggcccacggaggaaggggcccagtgtgtttgtgccggctcgaggctcacgcgggctgccggggtcacatggcccgggcatgtgcagcctgctccatttctaccacaacaactcgctcataaacagcccggctgctgcggcggtggcggtggagacatgtgcaagcgagggggtggggcacgtggccctgcccgagccaagggaaggcgctcgctcagcactgcctccacccctccccagcactggcgctgcctcgtcacaggaaattcctagtgctcctgttgctgctgcaaaacatgttttggggaagtgactttcaataaggatggaatcaatggactatttaaaaagagacagaatggataatcagttagagaccgacttacgcctgcccttaccctctcttaagatctctgtactggttagggtggtaccagttccttcctcctatataaaattggaaccatgtaatcccagcactttgggaggccaacgtgggcggatcatttgaggtcaggagttcgagaccagcctggccaacatggtgaaaccccatctctacaaaaaataaaaaaaaattagccaggcatggtagtgggcgcctgtaatcccagctacctgggaggctgaggcatgagaatcgcttgaacccgggaggcggaggttgtagtgagccgagatcatgcaactgcactccagcctgggcaacagagcgaggccctgtctcaaaaaaaaaaaaaaaatggaaccaatcaagtcctcatggtaaacagtggggggaggggctggggttctctaagacagtggttctcaagataagcatagggatctggggtcacctgggaacatgttagaaatgcaaattcccaggccccatcccaggtggattgaatcagaagctctgggagcaaaacccagcaatctgagttttaacaaggcccttgggattctgggaagcctgagacccactgctttaggtcttcggtccctaacaatcagtcctctaggagaatctagcccaagatctggggacatgtcagctgggcgtggtggctcatccctgtaatcccagcactttgggaggctgaggcaggcggatcacttgaggccacgcattggacaccagcctggtcaacatggtgaaaccccgtctctacaaaaaaatacaaaaattagccgggtgtggtgtgtgcctgtaatcccagctgctcaggaggctgaggcaggagaattccttgaactgggaggtggaggttaccatgagccaagatcacacactgcactccagcctgggcgacagagtgagaccctgtctcaaaaaaaaaaaaaaaaaaaaagatctgggggcatgtctaccttccccctttgtgctgcttcatctcaaagtccagccacagggcgtaatcagatttagtttgactcagagtaaaaagcatttattgagtgcctcctgtgtgcagattctggaaatgcgggcaaatggcacaacagtagtaggctaatgagtagctgagatctcaaagaggagtggaaggtactgggtgaggggagagtgaaagaaagaaaaggttagaattttatttgtttatcctttctccatcttacctacttttcttcctgtcccgaggctcctattagaacaaatgattgtggcttaaattgttttgaggctggaggtagaaattaagcccttatctatttttgctggccatggggaccccaagttagttaacagccataggctcttgacttcccatgagtaactaaaagaagatgaggaccatgcacacaggcacacacaaacactccctgcgatctcagatgctagggtagggagaccaagagaaggaatgaagtcccagaaggttggaagttccctgggtaaaatgagtttagcagataacaagcaggaaaagtctttcaataggggagggcggggtcatccctggcctactccaccttcctgagacccagaaactgtggccagaggaaacaaagggtccctaaggcaaatcacaaaagctcctgagaatgaaacctgagcctggaaagagagtagagaatgagggatggacaccagatccaaagggttcccttacacaggcaaatgggggttagggggttgggagggatgtgagccatgcccagcccctctccttgggccttctctccatcacaggcagttctcaggagcagaactcctgttactgtctcagtctgagcagctgactcctggcctctccctgcttcattttttgaggaataagcttttctctgattctcacagagccctttcttttgcttctctgcaaggctttctctctgtgcctgaaaggctctgggctcaaggagcagacagccctgcaggctcaactgcagtgacctacattggctctcccctaggccctgggtgcgggggctgagatttcaagataggaacctgggaatctggcacaggtctacagatgatgacatcaggcagacaggctgcaaaagtggcattgagggactggaccctgaggcaggggatgccataggactatgttctcactttgtcatttgagggctttttatggacaagagatcagaagagatcaaatgcaaaaacacctgagcagtgaccccttggagaggagccagtggtccctgacaggcccagtctctattaatgagatttgggagtggtttctgcctgctccctgttcttgctgaacctacactggtctgctgcaggggactggaaagatgatgtggaagaatgagttcggatttcagctgatttatttcagggaaacgaaggctgggtaaaagtcagatatgcagaaatccacgtactcccaggcttaactataatatagagaccctgtatttctttagactcaatggttctgagaaggatccagaaggagccctcaagattaattaccatttacaaagtccttacctcaggaccctggcaactgaatccctccttccagctaccagccttctggaacagagaaggcagcttctgaaataggtgctttccctctctcccactataagccacagtgtttaggatgaccactgcttccagattgtgtgatttgccctggcaaggaaatcctattgtggggggaggaaatgaggcagtcgtgacacaaagtgatggatgagccttttgcttagcagagagagagagaaagccggcaggctgtgcagaactgagtggctcttgggtccaaagggcttccccttggccaagtcccaccccaaagcccaggaagtccacagcttggcgcccagtcaaggcaaaaacattcctcaggactctgacaggctgggggatggttcccaccacgaggatgggggaggggaaggaaacacgcgggggaggaaatgaccacaaagaagggggtgagggtaagaggtggggagtgagttctcagtgccctgagtcccttttagagagaaaggttgaggctggactcattggcttgtgaaggacttgcagcttcagagcacatgacttctgggtcacccttctgctcagggtcatccctgatgacccaaggtgtcctctggaggcttgttaactcaatctccctccttacgcaggggctgtggttgagcttgggagcccctgagtggctaaaagctggaattgcagttgtgctgggggaggagcccatcgggtctccctctgcctctccacctccgcccctccctttccctctccctaagcccaggactctggaaatagcacctggtaatgggagcgctgacagatgctgagttataggagagcaaatgtcctggctagagtcctcaacattctagtttgatcgcttttgggctgtttcccttgaaaacacgtgccccagcaaggattgaaaaactacctattggtactatgctcactacctgggtgacaggttcagtcataccccaaacttcaccattacacaatatacccttgtaacaaacctgcatatgtaccccctgaatctaaaataaaagttgaaatacacacacggaaaaataggtgccccaggactacttccattgtcttccataaattactgtttaacatgcccctgggtagtgtgcttcctggctactgagatccccctcctagggctccccggcttgtagcttctggaccattcactgtccatgacccctatgaccttggagggagaaatggccccacaataattctgattttaaatttacccctccctacctgcactacttagtcctagttttcctcctctgagccttgcccacaactccttccccaagtcagcctccaaccttgaatgttccctcacccccagttccctacccaatcccccaatcccacatctcctgtaggggataggagtgaggtgaaaaatggacaaagcttagaaatttttccaaggaaactagttccctctgcatggcttcctttgacctattttctaactttccctggttagcccccttgttccatgtaccaaggcttcccactggactaatttttgctgccccgccctactcctccttcctccaacatgatctcctggggctcttcccatccagggaaaatgttccccagtgctgagagagggagagattccattttggaaactatgtcagcttgaggagtccgagctcttaaagagacaactagagtgttgctggggaagcgggtagtggtagtgagcaaaaagcagctcacccacccagaggaggccctgttcccatcacccagcccataattagggcattcttggctcttgtctggaatgggaggatctgagtgctctgccaacatcatgaagaactcaacgggaaatggagttggagtagaggtaaccaactttgcagctggaaattaaaattttattcaactccacccccaagtaattttatttgatgacatccttctcttgcatttgtctcatcgtttgattgtgtaatccttagccagggagctatgtagatatgaaatcattttaaacagaggcagctgcattcccctattgtacctgagccctcatcagctttcctcctctcaagctgctgccccacattcaccctgaagggggcacttttgttcagtcgttagctggtgccagctgaaagcgagctccaggaaggaaacataacaattggtcacatgttggggtgagggttctcgcaggggctgctgggacagggaagggaggtccacgtggagtgggcggaacgcgctgaaagttttggcggggctagcagagggagaaaaatacccaaatttgagttgtgatttttaatagggggaaaaaaaaaaggcaaggagggtgtgtcctaccctctgagaggcccccgcagaggggagcaggagagcagcacactagcatcctgctcgcggaagcctggaacgcaggacatggtttctgccagaaagagctgagccaggccaggctgcggagctggaagcctctgtggctccacgctggcttcccatcccccatcctcccggagaaggcaaaggtggcctctccaactgtggtgtcctttcagtgtcacaggactggggtaataccagtcacacaactccagtctctatttacctttccgagagcttcaggaaaccacccagatgaatcctctttccctggggagtggccaaaacaagtctcctcttttttctacctacttctgccccactgttagctggaaaacgtagctttatacagtcataaagctgcaagggaccttaaagatgatttatttccattttattttttggtctgggaaaaccaagcccagtcaagtgaaaagtcttgctgcatcctctttccacgacataggcattcccttcaaagaatgtaggtcatagaaatggaattctgccattctataagccttagaggggtggtgaaagtattggcttttaactctttccatactcttagccagaaggcaaaaagaatggtcattatctcattagggacagaattgcttagggaggcccgacactgtggctcaatccggacacggtgactataatcccagcattttgggaggctgaggtgggcggatcacctgaggtcaggagttcgagaccagcccggccaacatggtgaaacccccgtctctactaaaaatacaaaaattagccgggcatggtggcaggcgcctggaatcccagctactcgggaggctgaggcagaaaagaattgcttgaacccaggaggtggaggttgcagtgagccgagattgcaccactgcactgtccaacctgggtgacagagcaaggcttcgtctcaaaaaaaagaaaaaaaaaaaagacttaaggacttgatttatggtcctaaacacagttttcctaggctccctcacagctggcaactccactttgcccctctgggcctttgagagctcccttctttacatttcttagttcagggatcaccacagcttaaaacttaatggtttggaaacaagaattcctttcccttcttagaagaccttctcttctcaggtttcagttttctggtggtttagccaggtcatcctgtgtattgagatcaagatcagacctccaatccaaaaattccagctttggctttggtggggaaaagcatgtttacttagtctggagcagtgaaatcctagactttggatttcagagctgtaaagtttccagaaaaaaaaaatgttgagaccaggcacagtggctcatgcttgtagtcccagcactttgagaggccaaggcggatgggtcacttgagcccaggagtttgagaccagcctgggcaacatggtgaggccccatgtcatgtaaaaattagccaggcatggtggtgcatacctgtagtaccggtgactcaggaggctgaggtaggagtatcacttgagcctgggagttcgaggtatgataatgtctgtgaacagctactggactccagcctgggcaacacagccagaccccgtttaaaaaaaaaagtcaaccaaccccagttgtagagtcccaagcagtggttctcaaacttgaagtacatcagaatcacctggagggcttgttaaaacaccacgtgctgcatctcaccccacagtttcttattcattaggtctaaggtgggaagccaagaatttgcatatctaacaagtttccaggtgatactgaaggtgctggcctggaaccacaattgggctagagaggaagaaaacatataatttattcatggaattgccagctggttagtcttagaaatttgacggtaaagccctccttctccctcaccccactttctattgatcaacaaatgctgccaattagtaataatgtgataactacattatcaagcattactaggtgccacatgctatgataaacattttacatggattatctcatttaatcctcacaataaccctgtgaagtaaggtattagtatagtcattttacagataagcaacctgaggtagaggttaaataacacacagccactaaacgggagaactgtgattgctatttgcagtttcacaccagaaactttgctcttaacagctgagtctcctcctgtcattccctctatatccccatactactagtatcttaaccactcatcatctcacacctgcactaacagccttcaagttggcctccggcttttggtgcagagacgcaaatattgaagttagctttcagatacacaaatctaatcattctatactttggtggaaatcctctgatgtttcaccaaggctgataaattatacattccttaactgggccttcagaccttcataatctggtctcaatctgttttatcccctacatgccccactatccagaactacactccaatgaacttctcccattttctacagttacatcctattttttttttgaaacggagttgcgctcttctcacccagactagagtgcagtggtgagatctcggctcactgcaacctccgccttctgggtttgagtgattctcctgtcttgccttagcctccctattaggagggactacaggcacatgccaccacgcccagctaatttttttttttgagacagagtctgtctcccaggctggagtgcagtggcgcgatctcggctcactgcaagctctgcctcccaggttcatgccattctgcctcagcctcccaagtagctgggactacaggcgtctgccagtacgcccagctattttttttaatttttagtagagacggggtttcaccgtcttagccaggatggtcttgatctcctgacctcgtgatctgcccgcctcggcctcccaaagtgctgggattacaggtgtgagccactgtgcccagctgcaatgttcttacctctgcctgaaatgtcctttgatctcaaccttcaaggcccacctcagttgtcacttcctccttaattccttccagatggtatgttcaaatttgttcctagacaaatttactcttctctaggtttcactattttattagagacagagtcttgctctatcaaccaggctggagttcagcagtgtgatcatagctcactataacctcagcctctcgggctcaaacaatcctcccgccttagcctcccaagtagctaggactacaggcatgcaccacaatgctcggctaatttttttttttttttttgagacagagcctcactctgctacccaggctggagtgcagtgacttgatcttggctcactgcaacctctgcctcccaggttcaagcgattctcctgtctcagcatcctgtgtagccgagattacaggtgtgcgccaccacatctggctaatttttgtttgtttgtttgtttgagatgggagtcttgctgtgtcgcccaggctggagtgcgatggcacgatctcgactcactgcaacctccgcctctcaggttcaagcgattctcctgcctcagcctcccgagtagctgggattacaggcatccaccaccatgcccagctaatttttgcatttttagtagagacggggtttcatcacgttggccaggctggtctcaaactcctgacctcaggtgatccgcctgcctcggcctcctaaagtgctgggattacaggcatgagccaccgcacccgaccaaacgttatgaccacaaagggactcaaaccctcaatcttctgatctgaagtcagacaccttatccattaaggccacacggtctcctactctaatttttggatttttagtagagactgggggtttcaccatgttggccaggctggtctcaaactcctcacctcaagcgatctgcctgcctcggcctcccaaagtgctaggattacaggtgtgagccaccagacccagccataatttttaaattttttgtagagacagggtctcactatgttgcccaggcttgtcccaaacgcctggcttcaggtgatcctcatgccttggcctcccaaagtgttgagattacaggcgtgagccaccacacccggccctattttttaatagaactgccaccctcagtcaagctaaaggtcaaaggtaggtagatgctttctcttaatatatctaaacagctcatttaatcatttaaccaatatttattaaatgcctactttgtggcaggtatggttctaggtgctgaggatatggcagtaacaaaacatgaagcagcccagtgctgtggctcacacttttaatcccagcactttgggaggctgaggcaggtggatctctcgaggtcaagagtttgataccagcctggtcaacatggcgaaaccctgtctctactaaaaacacaaaaattagccaggcgtggtggtgcacgcctgtaatcccagctacttgggcagccgaggcagaacagtcacttgaacctgggaggcagaggttgcggtgagccgagattacaccactgcactccagcctgggtaagagtgagactccgtcttaaaaaacaaacaaaccccccaaaactatgaagtttacattgtagtgggggaggataaggtaataaggtaaattagaggtaatacatgctaaggagaaaaatcaagcaaaaaaagggaagaggcggtttggagaaggctgtgagtatacatagcgggggccaaaggtctcagctgacatacagtaaagagctgaaggaggtgagggaggaagtcatgtggacatctgaaggaagagggatctaggtagagggaacagcaactgcaagggcctgaaggggccaacagaaaggagtgaataacagtagaaactaaagtcagagagcagtaccagggagccagatcctacaagccttaatgattttacttttactccaagtgagatgggaagccatgagagggttctgagtagagaaagatcatgatcttactcccatcttaccaggaccactgtggctgctgagtagacttaagtgatggaaggcaaaggttgaaactgagagaccaattacagttactgcaattaaaacaagtgagataggattgtgtggcagaggccagggtggaagttgtggaggtgttgagaaactgtgggattttggacatacatatacatatatatatatatatatatatatatatatatatatgtatttttttttttttttgagatggagtctccctctgtcactcaggctggagtgcagtggtgggatctcggctgactgcaagctctgcctcccgggttcaccccattctcctgcctcagcctcccgagtagctgggactacaggcccctgccaccaggctcggctaaatttttttttttttttgagacggactctcactctgtcgccaggctggagtgcagtggcgcgatctcggctcactgcaagctctgcctcctgggttcacgccattctcctgcctcagcctcccgagtagctgggactacaagcgcccgccaccatgcttggctaattttttgtatttttagtagagacggggtttcgccatgttagccaggatggtctcgatctcctgaccttgtgatccgcccacctcggcctcccagagtgctggggtaacaggcacgagccacgacgtccagccttggacatacattttgaaaggcaatggggtgacaaagagaggaagactgggctgggcgcggtggcttacgcctgtaatcccagctttgggtggctgaggtgagcggatcatgaggtcaggagtttgagaccagcctgaccaacatggtgaaaccccgtctctactaaaaatacaaaaattagctgggcatggtggtgcatgcctgtaatcccagctactctggaggctgaggcaggagaatcgcttgaacccgggaggtggagaggttgcagtgggctgagattgtgccactgcactccagcctgggcaacagagcaagactccgtctcaaaaaaaaaaaaaaaaaagagtaagactgtagaagtggtatttgggtgtttgggtgggaggaattcgggagcttgatttttagatgtaagtttgaaatacctaggccgggcgcggtggttcacacctgtaatcccagcactctgggaggccgaggcgggcagatcacgaggtcaggagatgagaccatcctgactaacacagtgaaaccacgtctctactaaaaaatacaaaaaattagccaggcgtagtggcaggcgcctgtagtcccagctactggggaggctgaggcagaatggcgtgaacccgggaggagctcgcagtgagccgagatcgtgccactgcactccagcactccagcctgggcaacagagcaagactccacctcaaaaaaaagaaatacctattagacatccaactgggtatgtatactagacagttggatatatgattctggagttaggggatgagtccagaaagaaatataaattacggagctgtcagcgtagagatggtgcagaaagtcttgacgctgaaggctgggcacagtggctcactcctataatcccagcactttgggacgcccaggtgggaggatcgcttgagcgagttcaataccagcctgggcaacaaaggctggtattacaaaggcccgtctctacaaaaaaataaaaagttagccaggtgtggcagcccaagcctgttgtcccagctacttaggagactgaggtgggaggatcacttgagccctggaggttgaggctgcagtgaaccataattgtgccactgtactctagccttggggacacagcaagaccccagtgccacaaacacacaagccttgacatggaaagagatcaccacattctatgtgccctctcatccctgctcactccattacttggtgtccctaagctcaatacttcccttgctgatctgaggccatacagtctggtgaaagagggccggactcttggcttcttaacacattcacatacgtttgtttaaaatttccagtgtttcatgctttcagcccacaaagcacagacacagttttaatgagaggttttcacatcaggccagagaatgtcagtcttctccatctccatagagattttaaaaagcacacctcagacaaaaaagaaaaacaagcaattaagactatttcagggctgggcacggtggctcacacctgtaatcccaccactttgggaggccgaggcgggcggatcacctgaagtcgggagttccagaccagcctgaccaaggagaaatcctgtctctactaaaaatacaaaattagctgggcgtggtggcgcgtgactgtaatcccagctactcgggaggctgaggcaggagaatcgcttgaaccccggaggcggaggttgcagtgagctgaatttcaccattgcactccagcctgggcgacagagtgagaatccgtctcaaaaaaaaaaaacgtttttttcacaaggaattctgaggacttgttggctcaattgcttggacataaagacacacatacatgaagctggagagataggaagaagcgctcaacacagaacaccctaagtatccctactccctttcaaggactaaatcccttcagagatttcctttgcttcagtccttcaggagcctcccgaagatgctaggagtcgtttaagaaggctggaagatggccgttgggaaggaactgttggtagctggcaatacttcatcccaaggaggcggtggcaatagctccctgggcagcagacatcatggattttcctccctctgggaaccagaggtccctccgtttctggtttgaatcccttagagacaaagaacttcattctctcccatacccgcgtgggactgctggggaggagagggggtggaggggttagacttctacccccatgaaacacccgcgggctcaaagaggagcctggatcctgactggtccaggaggcgtgcggggccgcggggcccctccggcttgggccaggcgcgttgccaagatgcccggggaaggggccgcccggcgcaggccggggacgtggagcgctcggggcgctcccacgtaggccacacattggccgcctgtatcctccttctttcctctcaactccattctctcgcgcttttttcccggggagcctccgctttccccttcttcccgcggccgccctcgcccttcttccccctccagaccctcccccggctcgcccctccctcggcagcccaccttcaccccgctcctccgcgcgctcctcggtcctcgcccctcagccccggcctcccctcgccggcccccggcccccgcggtcccctccctgcccccctcgaggcggcggcggcccctttcacaatagcgcggcccgcctccctcctctcggctcccggtgcactcccgcccgctcccctccccgcgcatgcgtcctccggttggcggcggctgcggcggtggcggctacgagcggctccgtttttttaaagggaaacgctgaggcgccgggggtgactgtgggggagggggaccccgagccgcggagacccccgggagaggcgacagaccccctctcccggagtaggagggctttgggcggacccagccctccaccccctcctgaggaggaggggggggaaatggaggctcggggcggttgaggcgagctccggggcggggggccggggcggggaagggggggtgcggggtggggagacgaggcgggcccggccgggccagggggggccgaagcgagctccggggatgagctcgggggcggctgggtgcgagctcctgcctctgaggcgaaggcggcggcggcggcagcagaggcggcggcgaggcccccatgggccggcggcgggcctcagccgcggcctccacgtctccgcacgccggcgggatggcgcccgggccccggaggagccgcgctagcggaggcctgctgccgcgctgctgaggcgagcccgccaaactcccctcccccccctcagtcctcgaccccccgcacctcgccccttccccaccccctcctccgcctcggtgcccggcgctgctccggaccactatgaccatgagatccgcggtgttcaaggcggccgcggcccctgccggcggcaatcctgagcagcgactggactacgagcgggctgcggcgctgggcgggcccgaggacgagcctggggcggccgaagcccacttcctcccccggcaccgtaagctcaaggagccggggcccccgctggcctcctcccagggcgggagccccgcgccttccccggccggctgcggcggcaagggccggggcttgttactcccggccggggcggcccccgggcagcaggaagagagctggggcggttcggtgcccttgccctgtccgcccccggccaccaagcaagccggcattgggggggagcctgccgcagccggagccggctgcagcccccggcccaagtatcaggcggtgctgcccattcagacgggctctctcgtggcggcggccaaagagcctacgccctgggctggggacaagggtggggcggcctcccccgctgccaccgcctcggacccggcgggacccccaccactacctctgcccgggccgccacccctcgcgcccaccgccaccgccgggaccctggcggccagcgagggcagatggaagagtatgaggaagagccctctcgggggtggtggcggctcgggagcctccagtcaggccgcctgcctcaaacagatccttctgctgcaattggacctcatcgaacagcagcagcagcagctgcaggccaaggaaaaggagatcgaggagctgaagtcagagagagacacggtacgggaggggttaatctgcattcgggccgaggagcgagttgtgcgcatgctcgggggaagggggctgtaggaggttaaggcacccccgggttaggggtaaaggaggttggccaccggcaaaggagtatcttaggcgctgggtctctgggagccaggctcacagacacgttgggttggagggaagggttaaagggcaacctctcagggggagggggaggggtttcaggtgccaaagggttaatttaaaatgacagccccagacgtgtgggaaagacgtttagtggaaaaagacgtgatctgtgaggggttaaaaatgaaagggtggggtgtaggtgttgtgtccttatggaagggttaaattaaagagctattgcgttagaaatgcacggtggaggagagggctgtagcaagcagctgttgctttcaccactgctgcagcatctttagataggagggcagtaggccttttagtgggcacaggggtagaggtgatttacgtggaatcctattttagttttcttaaatgatattaagagaatcactgcctttgatttcagacagcttttaataggaacctgagttctaatacatgacccactgaccaggtcccttttataagcatggtgtttgaaactggaagattttagggcatcaggggaaagtaagcttattaaatgtattaaatagacctccccatccttattttagaatcttagggagtaggaaagtcgtttattatttctttacttctgaggagcttggacgacacaggcttgtttttactgcagcagtagttaagggcatctctgcgttaaaacatattccttcagatatgagggaagctggggtggggggtattactgtgctagcataccttacagctgcctaaaaataaacatggtttctacaattgttgtgttcaggctgcagcagtctctctctccctctctccctccctcttcctccctccctgtctctttccctttctctctctctctctctccctccctccccgccgtcctcatctctccctctctcctctttctctctggcgtcgtgtgcgctaagagctgagcaagggagcaagcggctattcattttgtttgctttccaaatgaatctcatcgggtggctgttttattggagaatgcattctgcaaggtggattgggagctggggcaggtctcattaaaatatctcatggtgttgatttgtggaagttactcaacatggaggtggcactgctcagactgtactgcagtctaggggtgtgatggtaccgtaattacaacacatcatatccttgtatggggggagtgggaagagaaggaccagtgaaggagaaaaaaatcaaggaaatgtcacccacaaatggtggttaagggctgtgaatcaaaacatatacaaggagatgaaatgagagtatggctgataggggggttctctgctgattgtggaggtttctgctcagttcctgaggtaatggcccctttgcaggctttcctagtcaggaaaagtggggtgagttaaggatagagtgtcagtctgaacttggtactcactgcttctgttgtgtattgcaatcttaatattgcttaagcttgtttcacttattccagttgttgtttggccttgtctgaaatctatgcaatgaatgtaatgaaggcagcgttaaacatcactgtctaacccagataaaattcttgtaatagagtataagtagcacaacaccttttctcaaaactaaactaacacaaagttttcaatactaatagagttccattttctgtttagttttttagtccttccttttaactaaaactaaaggaactttgattttaataaatatttagatgaataggtataattttttgtgttacctcaaattcaaaggaatgtgtttatgtcatgattgttggaattatgggtactgatttctattttccaaatgaaatgttcattgttttaaaagtaccccctcccacacatacccctttcaaataacactgccattcctggtggcactgtatgagctcttaattccttctcaatgtactgtttgcactttgctgttgtgtatagagctttggagtagaagtagagaggatagaatttggacaatctcagggcctcttaaaagatcatgtaggctgggcgcggtggctcacgcctgtaatcccagcactttgggaggcctacgcaggtggaccacgaggtcaagagatagagaccatcctggccaacatggtgaaaccctgtctctactaaaaatacaaaaattacccggtgtggtggcgggcgcctgaaataccagctactcgggaggctgaggcagggaggcggaggttgcagtgagccattgcaatccagcctgggcaacaagagcaaaactccgtctcaaaacaaaaacaaaaacaaacaaacaaaacatgtatacaattaattctggaaactcccgaaccaacttggagccacacaggtagcagtagcagagaccatgccattaaaaggcatgttacggcccttcccagtggagaggatctccctacagaagaatgaactacaaattaccccatgcctcttcccatctaggttagcccttaaaatttaacagtataccttctcttctctattttgtttaaggaaaactgttcagattaatgtctgcctatttaaaaagttgagttgatgtggtccatagaaagaggcagaagactatactgattcctaaatggggctaagtatctgtgtgtttaattttttatgtgttaagtctgcattttgctactctctcttttagctccttgctcggattgaacgtatggaaaggcggatgcagctggtaaagaaggataacgagaaagaaaggcacaagctgtttcagggctatgaaactgaagagagagaggaaacagagctatctgagaaaattaaactggagtgccagccggagctttccgagacatcccagactctgcctcccaagcccttctcatgtgggcggagtggaaagggacataaaaggtgtgctgataactttgtttgatgaggacccttgttaccagtgattgagagtaggagattgggatttatgaattggttttatagcaatcataacttgctttagaagtcttctatgcggagggccgggtgtggtggctcacacctgtaatcccagcactttgggaggccaaggcgggtggatcatgaggtcaagagatagagaccatcctggccaacattttgaaaccccgtctctactaaaaatataaaaaattagccgggcgtgatggcgggcgcctgtagtcccagctactcgggaggctgaggcaggagaatcacttgaacccgggaggcggaggttgcagtgagccgggattgctccactgcactccagcctggcaacagagcgagactccgtcaaaaaaaaaaaaaaaagaagtcttctatgctgagaaactatcttgaaacattcttatgcagactgtaaaagtctgtttaggagtattttggtcacagtaataattattgaatgcagcttacatcataaagagaatgggcaataagtatgacagctgagtttcttaaaactatagcagttcacttcaagttaggaagtgttaaattccttcattgtgtcgtgcattggtagacatagaaaagtaaaatacaggccaggcgtggtggctcatgcctgtaatccctttgagagggcaaggtggggaaggagtatggaacgtatggaaagtggggaaggagggatcgcttgcgcccaggagtttgagaccagcctgggcaacatagtgagacctcatttttacaaaaaatccaaaaattagccgggcctggaggtatgcacctgtagtcccagctactcaggaggttgaggctacagtgagctgttactgcaccactgcactccagcctgggtgacggagtgataccctgtctcaattgaaaaaaaaaaaaaaaaaggtaaaaatggaactgtccttggactcaaagaaattagcccaactgtaaggataggcatacattttgaaaactcagaattcaaatgcagtaaaatacgtagatgtacaacacctgatataaactaaggctttttgtttgtttgagatagggtctctctctgtcacccaggctggggtgcaagtgtcgccaacatggctcacttcatcttccacctcttggactcaagtgatcctcctacttcagcctcccatgtagctaggaccataggcactcaccatgcttggctaactttttttagtttttgtagagacaggctctcactttgtttcccaggctgatctcaaactcctgggctcaagtgatcctcccgaagtgctgggattacagacattaaactaagttttgtaagattcagggatattaaaagttattctgggttagaattgtgaaactttaagtagaaatcagtcttgaaaaagaagtatagccgggtgcggtggctcacgcctgtaatcccagcactttgggaggccgaggcgggtggatcacgaggtcaggagatcgagaccatcctggctaacacggtgaaaccctgtctctactaaaaatagaaaaattagccgggtgtggtgcatacacctgtagtcccagctacttgggaggctgaggcaggagaattgcttgaacccaggaggtggaggttgcagtaagcagagatcgcaccactgcactccactctgggtgacagagtgagactccaaaaaagtattaaaatttaggttggtaaagaggaagggagatgactttcttgggatgtggtgggggaagaagggaagaagaaagaggctagagaatgccagcagacagtaagaaaaaggaaataaaggttacaattaatgtggtacagggttgggggaaaaggaaagagactgatctctggattacaagaagtaggtgcacctaatgtgggttgtagtggtacataatgttggctaaaggaccttgaatattctttttttttttttttttttttctgagacagagtctcactctgtcgcccaggctggagtgcagtggcgtgatctcagctcactgcaacctctgcctcccagggtcaagcgattctcctgcctcagcctctcaagtagctaggattacaggcatgtgccaccacgcctgactaatttttgtattttttttttttagtagagacggggtttcaccatattgaccaggctggtctcgaactcctgacctcaagtgatccgcctgcattggccttccaaagtgctgggattacaggcgtgagccactgcgcctggtggaccttgaatattcttaagcatggaaattccttgttcaacatttactggccaggtgcagtggctcatgccggtaatcccagcactttgggaggcctaggtgggtggatcacctgaggtcaggtatttgagaccagtctgaccaatatggtgaaaccctgcctttattaaaaatacaaaaaaaattaaccaggcatggtggtgtatgcctgtaatcccagctactcaggaggctgagataggagaattgcttgaacccgggaggcagagattgcagtgagccgagatcatgccactgcactccagcttgggtgacagagcaagactctgtctcaaaaacaaaacaaaacaaaacaaaaaatttactatgggcctattttatatactgctaagcctgggctgttcctgctcatgactgctaaatgagcaccagacatttaggtacctgaatacttgtcattttggggcaaaagaaccagcttattcttttgctccagaatgtgttcaaattagattttattcaagtgtcaataaattttataatgttttcttccctatctaataggaaatccccatttggaagtacagaaagaaagactcctgttaaaaagctggctcctgaattttcaaaagtcaaaacaaaaactcctaagcactctcctattaaagaggaaccctgtggttccttatctgaaactgtttgtaaacgtgaattgaggagccaagaaaccccagaaaagccccggtcttcagtggacaccccaccaagactctccactccccaaaagggacccagcacccatcccaaggagaaagccttctcaagtgagatagaagatttgccgtacctttccaccacagaaatgtatttgtgtcgttggcaccagcctcccccatcaccgttaccattacgggaatcctctccaaagaaggaggagactgtagcaagtaaggcatagagaacacttgctcttataccctagtggtggcggtcaagctaacaagtgtgaaaatgcctttggcatttttaaaaaagtgcaatcaataaagcagagttctgtcaagaatgagtaagttaacagccagagacagacactgtgcaggcattgcaaatagatggaattacagcaaaatgtgctcaatgtatttgcctgcttacaacactgggagatgtgtttgccagtaagttgctcatcacaagagcaccagacttgggggtgtaatctccggcaacttgcatgccctctgaaagaagggttttctgtgctgtgaaatgcatagaactatactttgccatgcacgactgttcctgcaattgatattgtgtgaaatctgggagggtggtctttgggtgttctcaggggccaatggtaatttttgggttggggagccagcttggggtggggaattttcacctgggcctccgctctttaactatataaacatttatctgtatatctatgtccctgtctggggggcaggaggaatctgccaaagaccaacagtcttactttatcttactatacttcacaaaggttctaaaatgtgaagagtttacttggattgcagtagcccattggttgttcatatatttaaataaaatggtctacaaactatttttcaaacaataaggactatcttgggatatctgagctgcttggggagggtgtggggtgtgggaccttggtcttcattcccttttttttttctttatggcttccacacagagatgctcccctatcttctacatcaaccagtaactggaatgtgccttcaatcatgtaatattagtctatgtcagtcactgcggttactctggggtaatggttggggaggccttctaggatagagccgcagtcccaagtttctaccactgtgtcttgcctagcaggatggggatagaaatccattccagtgagacaagagcgttctccaggctttgtttggctgttctggtgacaaaattaagtgggaaagctagattagtcgtcttaatgatctaacctctattaggcctcacacttgagtacatgagatagatcaggatcctgatctaggttcagatttttgttggttcagtcagttgaacaggttcttccttaatggttaacctcttttgctgccatggcaatgctgcgtaacaacttaagagaaacgtgaagcaacttcccatccgggattgggtaatggcttggtccagagctgttctgtgtgactggctatttttgaaaatcctttcttccctagtacagacaatttcaaacacctctgagattgtgggcatagtgaaacaaaggagtctaattggggagatcccagccccttgaggagcctgagttgtgaataaacatgtgaatccttattcttgatgcccctatctcaagaggaaggctcaatggcttgttctaggggagccaaagtctttgtgcatgttgttcaggctggaccagcaaggtagtttgtttggagggaggagggagctgtttaagaagactacatatgtaagttttgagaacactgatcttttatttgaaaaatagggtcaacttttactcacctgccatgttctgagtttaaggtttgatatccttggccatcaactgttgcagggaaaccaccctaaataatgaagaaaagaagtcgtctcagtgtaaaaaaaaaaagtggtgggcttattttcttttcttttgtctgttgttccctcttcccctcccccagagagaaattctcaaaagaacaactcaaaaaacaaaatggcttcctagtgagaacttcagtgatgatcctttcctccatttggggtatgggctttttttctttttacactgagattattcttctttcctgcattatttagggtgtctgatgccatcaagtgttgcaggagaaacttcagtcttggctggtgagtagaataggaattgtgctggctgggcctggggtgggggttggtgggatggtggatggttgggagctgcattccccatccactggatgtgggagactgagatttcttggtgtatgattgattacactactatagacttcaaaatgacaacaaatttcagttgtttttcaggaactgctatagcatcattatatgaattgtcaggtattggtttagggtttttgtgatcctgagtttggcagactgcaatggcattttaggttcttttataccatagcaaggacactgaatatggcttcagggaggccatagaatggattcctatcacttggtaactttgtctcttctggggagagacctcttatcctagtgaatagttgtgcaactttggatttaagggtggttccacccctcctccctttctttttctctctcttttttttcagttccttcttggagggaccactcagtagagcctctaagggacccaaatccttcagaccttttggaggtaggtaaccaagagcactcaattgaagagagtaagagattaaatagaatgtgagggtataactggaaaatgtcatagtactatggatgaattaaataattttaaggccagacagaaacttgagaaattatctagtccagctccttcattttatagattaaaaaacaggtctagagtagttaagtgatttattaaaaaataaatagctaggtaatgttcaaaacaaaggtagattttatgctaagtagaaaagttagggctgggtgtggtggcttacgcctataatcccagcactttgggaggctgagacaggtggatcacctgaggtcaggagtcagagatcagcctggccaatgtggtgaaaccccatctccactaaaaatacaaaaattagccgggcgtggtggcgcacacctgtaatcccagctactcgggaggctgagacagggagaattgcttgaacccaggaggcagaggttgcagtgagccaagatcgcaccactgcactccagcctgggtgacggagtgactccatcacacacacacaaaaaaaagcatgtacccctcaaccataaaattacatattccaagctcatttgactcttaaagttttgattattttaaagtcagactcttacaaagtatggaggcagggagggtttatgacagtctgggggttttagtttgatgtgatgtttaccttggaaagatatggaaatgattttgaaatttggagattctaaaaggatgtggatggggaaaggagtatgtgttttgttgattctgttaccaggaggttcccatactgtccatggaacccacagactcaggtagaaccggaaggtgaaagattttacgttcctggaagctggaaattagttagtatatgtgtgtaactaatatatggtgataaatagcttatcagctgcttttctttacacagaacctggatgacagtgtgttttcgaagcggcatgcaaaactggagctggatgagaagagaaggaaaaggtgaggccagagatgtccatcctggaaacaactgagccctaggacctaggacagagtatcagggaacctgacctccctttttcatgctgtggagaatcttggagtgcttaacactcttacattactggcttcccagttggttgaatatcttagttggaaatggtagttgttgcggtaaacatgtttggcctctttttgtgtatgaccttcctcaattctactttctgtggaacaccaacacatgatctaaacggtagacctaaacagctctcccttaacaaggcagtcatttctctttaccctgtctagaggagtcagcaagggtcttcctagcatctggattgtgtgagttgcttttatagagcaggttttgggtaaacagtaatgttgggtttctttgttttgtttggtttgtttttcccagatgggatattcagaggatcagggaacaaagaattttacagcgactgcagctcagaatgtataaaaagaaaggaattcaggaatctgagcctgaggttacctcatttttccctgagccagatgatggtaagttgtgtccatctaaaagagtaggtttttgaaagaaggaggagggtgcaaggctccagggtacaacttgctctgaatgaatgaagtgtattttggagcagatatagcttctagacatttcccatctgtattactaatacgctcccgtttgactttctcccatagttgaaagtttgatgattacccccttcttgcctgttgtagcatttggacgaccattaccaaaattaactccacagtaagtatacattttttttctccccttccaggtaacctgcacatccttttcagacttcatggaagcctagatatgaggtggaaccaggtggcttagggatagccatgggtctttgacagaaatgaggctacctgggcaactagcttttgtaataagattcccaagccaataattaggagtattgctttttgagttagaaatagatgattccatcactttaatggtacacagttgctctggctttgaggcaggaaagacactccaaactagtcagggataggagtggtaagggacatagtgacttttttgtagttgctatcatgtccacactgaatcccttctagtcttgcaagttgatttcctcatccttttttgccaggaattttgagctaccctggttggatgagcgtagccgatgcagattggagatccagaagaagcaaacacctcaccggacgtgtaggaaatagctgtgctggcaagaaccctgtcttcagatagttgtagcatgccattcccgagagtggcagagacctgtatatgtgacctttgtcctcacatatgttatcactcgctgataataccctttcatacttccttgactttgttttcattactctgatttcacaaaaactctttcattcggctaattgtgagttatggagggtgattgggatttcttttcccttttttgggaaatgggctctcaagctaaagctataggatggcagattcagaagtttcaggggtctgtttctatacatttgcctatgttaaaggggtaaaagggctctcttcattagacatgtggaagatgaagcagccccttcctttagagctgtgcctgcatggcactcttctcaccctggtacaccctccttatagtgggtatagtgatttttaaccctaaaataaaacaaacaacctcaccatgagctttaggaccagaagaggaatgacaagtgaagcgatgaagcaagccatcttcacagagtagaaaagacatcggagagttggtagataactgtctgaaaagatagttgttcatttgaaactattctgtgatacagtcatgtgggaagggatgtttggctgtgattattttttcagttaatggataacaatttctttactgctcaaaaaccaaaatctttggaaaagaaagtggggatggttagtttcagaacaagttacagctgtaaacaaaagcacttagtatttgggatggcatgccaaaacctgtataaatgtccttgtatcacatcacttctcaagtattccttcattgggcttcatccttttagcagaactcttggtggtgggatagagacttagggagggtagggggagagtgtggaaataggtgcttcctttggctggcaaatgtctacatcttgaaacaaacagatgtacctaatgagcttctccattcactttgtaaaaataatttgtatgtgtaccatcttggtcctctcccctcccgttttgttaaaatatcaggatagcactcccaggccactttggtctcagtgtaagatccctattaactatctgaaaggaaaatagagccaagacctctggtctcaaatatataggaattgcctttctttagtcttcaggactattgtgtgaaaacaagtaggggtctaatctcctagaaggtaggggcttttatccttaaagagaatatgtccccagattattagcacttttagaggagaagccaaggtatgtagggtgtgtggctggcccatcagtggagcacgaagagagaatgggataccattgtgggaagagaagaaaagttcctcaggggcctcccactgctaaagttttttgtgagatgttgatctgtgcttcctggatttgacttttaaaggaattattctggcagcacatgtagtattcttggatgatcttgctgctcttatttctccttttgtgtgtgtgtgtgtgtgtgtgtggctatgggttttcatttgtaactccatctgcttaggagagtgggctctctataagggaacctgctgtaaacttcattgcagcaaggatgtagagagaaataggacttaattccactaggggctctcatctcacaccttaaggaggagatttctagaaaaactgggccagattttctttgttctccatcattttaatgtggcaggctgttcagttttcttactcttacctatgtgatatttcttcgtaacgtgtccaaaaagaaaaaagacccaatcagtgtctcttgactttgttctttgatccctcagtttcttcttgatttcagcatgtgtcgggttcctaattttgggtatgagttagcaaatttaaccattgtgtttgtgccctacccaggggactccccagtttctgacttgaagtagactgagaagaatccacgaggtgctatctggccagatttaagtagattctatttccttggttctccctctccctgaggacctcttattttattgtcccctcttctaggttaattctcctttgatttgactttgttgagaaggaggttggacagtagattagcaaagttccaagtgcaaaattacagtgtgttagagtgtggggggaaaattagtcttatttttccctacatgggatacaacactgtgaattcaatcttcaactgaaggccctgcagttctcctaaaacatagttgtttgtttttctttaacaaagtttaagctagtgttaataaattaaaaaaaattgcttgtctgtctacttcagctttgttttatgcccatttcatattgttgtctgtgttgtaattcataacttttgataccatttctgatgtgtaaaattggttgtcttgtaaatatcttataaagagttcaattgtaaataaactattgtggctgttaatttttgaacttctgcttcaatttattatatttattggcaaacaaacaattctgcttgtatatttgaaacattggaaaaagaaatccattttctcaataaaaaagaataacacattattttcccctttataataaggtactcacttccatttgtgtataagtataatgtatgtttcatccctctttgtccagtgtacttccttaagtataatcagcaacttggctgggcgcagtggctcacacctgtgatcccagcactttggtggctgaggtgggcagatcacttgtggtcagaggttcaagaccagcctggccaacacagtaaaacatggtaaaaccccatctactaaaaatacaaaaattatccagatgtggtggcatgcacctgttatcccagttacttgggaggctgaggcaggaaaatctcttgaacctgggaagtggaagttgtggtaagccaagatcaagctgctgcacttcagcctgggtgacagcgagactccatcccacccacccccaacaaaaaaaaagggtcgggcgtgttggctcacatttgtaatcccagccactttgggagactgaggtgggtagatcacctgaggtcagaagttcgaaaccagcttggccaacacggtgaaaccctgtctctactaaaaataaaataaattagccaggcttggtgacaggcacctgtaatcccagctactcgggaggctgaggcaggagaattgcttgaacccaggaggcagaggttgcagtgagccgagatcatgccattgcactccagcctgggtgatagagggagactccaactccaaaaaaaaaaaagtataattagcaattttagaaacgagattataggatacttcgtaagttaacaaaatcttatagctggaaagacattagaggtcatctagtgtgaccccgatatgtgatttacccttgataacactccagacaagcaaattccaggctgtgcttcaacactttttctacatacatttttccccctaagtgtttgaaaattcttgcttgttgacaaaaaatctaacttcttgtaacttaaactcactggtttttgctttgccttctaggatgatgaaaaaaagaccaatccctcctttcttcatagtccctagttaaagattgctgtgggctccaggcccggcgcggtggctcaggcctgtaatcccagcactttgggaggccaaggcgggtggatcacgaggtcaggagttcaagagcagcctgaccaacatggtgaaaccccgtctctactaaaaatacaaaaattagctgggcgtggtggtgcgcgcctgtaatcccagctacacaggaggctgaggcaggagaatcgcttgaacctgaaaggcggaggttgcagtgagcccagatcgcaccactccactccagcctgggcgacagagcgagactccgtccccctcaaaaaaaaaaaaaaaaactggacccagactaaacaactgaaggacaaagtggcagactatcactttccttatttagacactaaacttggcagccttatttgcaccaatttagtctgtgatcgataagatcctccaggttctttttctttaacacttattaaatcatattatcctccattttgaactcaggcagttggcttttggagctggacttataagttgtcacgtttggccacttgtctaattagctgagattgtttgaattttctttttttcttttttttgaaacagaatctctttgtctcccaggctggagtgcagtggcgcgatctcggctcactgcaagctccgcctaccgggttcacgccattctgcctcagcctcccgaatagctgggactacaggcgcctgccaccacgcccgtctatttttttttatttttagtagagacggggtttcaccgtgttagccaggatggtcttgatctcctgacctcgtgatctgcccgcctcggcctcccaaagtgctaggattacaggcgtgagccaccgcgcccggccttgaattttcctttcatctctgaaggcattcataattacttccagtttcatgttatctataaatttgataaacatcaggatccttaaccatgtcatttataaaaattttactcaggaaaggccgggcgcggtggctcacgcctgtaatcccagcactttgggaggccaagaacggcggatcacgaggtcaggagatcgagaccatcctggctaacacggtgaaacctcatctctactaaaaacataaaaagttagtcgggcctggcggcagacacctgtagtcccagctactcgggaggctgaggcaggagaatggcgtgaacccgggagacggagctttcagtgggccgagatcaccccactgcaccccagcctgggcgacagacagagtgagactccctctcaaaaaaaaaaaaaatattttactcagggaagaattctatgccatggtggcctttgtttgataacatacattattaacgtgcactcctgtaggtgcactaaaaacttagctcatgcactttgtatatccttataatggtccaaagaaaacacactgattcttttcaatggtggccaatgccttgccaaaatgaaataatttccataaaccttaagaaggaaataatgtcaggattttgaatcaacatctgtttctactgaccatttatttttaaataggttctaaaatcctgacaagggcagtagctcatgcctgtagtcccagcactttgggaggctgagacgaaaggatcgcttgatcccagccaggagacaagcctgggcaagagcgagaccccatctctacaaaaaacagaaaaattagccgggtgtggtagtgtgtgcccgttgtcccaactactaaggaagctaaggcaaggaggtcacctgtgcctgggaggtcaaggctgcagtgagccgcgctactgcactccagcctgggcaacagagtgagaccctgcctcgaaaaagccaaaacaaaaccggtaatactggcatcataccagcctgcactttgggacaggtgatggctggggtgggaagaaacgtgaagaggaaatgagaacacagagaaaacgctgcaacaagaagtcctctggcttcactgcagacaactggtttctccttcgcccgttatcttaaacaaggctggtgcagcaaatctgacgcagcactacagcttttaagatttaccttgattcgtgattttaccaagcaaaggaatgcagtaaattgacctgcttcaaacgtaggtagaagtgagaaatggaaacagaaaaccatgaaacagccctagtgttgcagtgaagctgtgacaggttgactccttccactcgggaagcccaagatggccgggccaggaacccgggaggctgctgaagtctcaattcccctcgccctaggcctgcccaagggaagtcaggagccgcgccacgcccccttacatcaccgatagacgtaatccgggtcggccgcaaacgtgccgcaggcctaggccccgcccagtgccccgcccctcccccaacacacacacacacacacacacacacacacaccccaacacacacacacacaccccaacacacacacacacacacacacacacacacacacacacacacacacacacacacacagcgggatggccgagcgccgcacgcgtagcacgccgggactagctatccagcctcccagcagcctctgcgacgggcgcggtgcgtaagtacctcgccggtggtggccgttctccgtaagatggcggaccggcggcggcagcgcgcttcgcaagacaccgaggacgaggaatctggtgcttcgggctccgacagcggcggctccccgttgcggggaggcgggagctgcagcggtagcgccggaggcggcggcagcggctctctgccttcacagcgcggaggccgaaccggggcccttcatctgcggcgggtggagagcgggggcgccaagagtgctgaggagtcggagtgtgtgagtgcgcgcaggcggggcggggtggggaccgggcggcgagccggccgggggcggggtgtaggtgatgctaggtagtctgtgagttgatagtagatactgggacttttttttgtttttgagagaaaaggggagttatcccaatgcgagtttgcatccggagttccaagggaagaagaaggattgggggtttctgggaggatggtagagccgctggagatggaaagcggatgttttattcagaagtcggggctggagggaaggagaccagacctgccttggctactacttgataaagatttacctatctctgtctccctctccaaccattttgtgctgaatcttcagcttttcacccacatttctttattgggctccccacctctggaaatcacagaactaacccatgtcttctgctttctttcaggagagtgaagatggcattgaaggtgatggtgagtagcatcttttaccccattaggacaagagttttttttaacataaactcaggtcatctatttccaacatcgacattctcacacactgtcacggatttagggccacagagtgcctttttgtaacatagtggttaagagcataggctttagcagtatagtcttcagcaagttaccctctgagcctgtttctccttttgtaagtggggactataattttatccacgttgtaggttgatgtcagaattaaatgagactcttagtctgacctgtaataagcagccaaaaaatgtttctgggtttctttttttccacatatttctgttttatttcagctgttctctcggattatgaaagtgcagaagactcggaagtgagtatgacaggttttttcctatggtatagatcagaaatgctttttaaaaacgtgtacacaccttcgttgcaaacgtaccatgacctccgtgtttatcctcttgtgtattcttcatttatgcttctgaaaaagtgttacagaaggtcttgttcactttagacctagggaaaacttggggcacgccgtctcaagccacaggtgttatactgttagttggcttctcttcctgtctgaagaatatgaggttctaaataagagagtgaggatatcttgaagtcctctgaaagatgtttgacagtttgttttatgcagtgtaggttgagaagccagccaattggttatttttttccaaatctatctgaagactttgaaagggtaggattcggaatgttttgtgccaagagcatccatcattttataggtggggatttttctgtttttaggagaaagtttcctgtcttttggataaactactagagatgccatcagagtaagtgtttgtttcctgggttgttgagtggactcctgagttctggtaatgggattatatatagggggaattggatggtggatcaaagattttgtctatacatttttagaactgttactacattttagaatctgttaagcccttgaggatggaatagtgaacactataacaaaattcctatctttagagatcttacaactcaataaggaagtcagacaaacattcaagcaattgtaccacttgctgataggggatagcactgggatagggctaagtagggtgttacagctgggtactgaatccatcttaggcagtcgggaaagattaaacagttggctgggtaagatgtgttctaggcagagagaacaacagtcaagaaagcccacaggggccgggagcagtggctcacgcctgtaatcccagcactttggaaggctgaggcagacggatcacttgaggccaggagtttgagaccaacgtggccaaaatggtgaaactccatctctggcccggcgcggtggctcacgcctataatcccagcactttgtgaggcccaggcgggcggatcacgaggtcaggagatcgaaaccgtcctggctaacatggtgaaaccccgtccctactaaaaatacaaaaaaaaataataataaattagctgggcgtggtggcgggcgcctgtagtcccagctactcgggaggctgaggcaggaaaatggtgtgaatccgggaggcggagcttgcagtgagctgagattgtgccactgcactccagcctgggtgacagagcaagactccgtctcaaaaaaaaaaacccatctctactaaaaaatacaaaaattagcttggtgtggtgatgcatgcctgtaatcgcagctacttgggaggctgagacacgaaaatcgtttgatcccaggagatggaggtggcagtgagctgaaatcatgccactgcactgctacctgggtgacagagtgagactctgtctcaaaaaaaaaaaaataaataaataaaagaaaggctgtaggggtacaaaaagaatagtaattagaatgaataagatctaaacccagcgcgatggctcacacctgtaatcccagcactgtgggaggccaaggtgggccagtcacttgaggctaggaggtcaagaccagcctggccaacatggcaaaactccatctctactaaaaatacaaaaattagcagctcatggtcccgcatgcctgtaattccagctactcaagtggctgaggcaggagaatcccttgagcctgggaggtggaggtggcagtgagccataatcacaccactgtactccagcctgggcaacagagcaagactcttgtctcagaaaatttaaaaaataaaaatgactaagatctagaatttcatatttgcaacatggtgactacagtcaaccagtaacttattgtacatttaaaaataactattggctgggcacagtggctcatgcctgtaatcccagcacttcgggaggctgaggtgggtggataacaaggtcaagagattgagaccatcctggccaacatggtgaaatctcgtctctactaaaaatacaaaaattagctgggcgtgcttgcacgcccctgtagtcccagctactcaggaggctgaggcaggagaatcgcttgaatccgggaggcagaggttgcagtgagccgaaatcaagccactgcactccagcctggtgacagggcaagactccatctcaaaaaaaaagtatatatatatattaataaaagaacgtaattgaattgtttgtaacaaaggataaatgcttgaggcgatccataccccatttacccttacatgattattacacattgtatatctatataaaaatatctcatgggccgggcttggtggctcacacctgtaatcccagcactttgggaggccgaggcgggtgaatcacctgcggtcaggagttcgagactagcctggccaacatggcgaaacccattttcagtctctactgaaaataagaaaaattaagtaggcgtggtggcaggtgcctgtaatcccagcgactcaggaggctgaggcaggagaatcacttgaacccaggaggtggaggttgcagtgagccaagattgtgccattgcacttcatcctgggcaacaagagggaaactctgtctcaaaaaacaaaaacaaaaacaaaactcatgtactacataaatatatacctactgtgtactcaacaaaaattaaaaactttctttttctttttttttttttgcttgagatggagtcttgctctgtaacccaggcaagagtgcagtggcatgatcttagctcgctgcaacctccacctcccgggttcaagcgattctcctgtctcagcttcccaagtagctgggattacaggtgcacaccaccacacccagctaatttttgtatttgtagtagagacggggttttaccatgttggccaggctggtcatgaactcgtgaactcaggtgatccgtccgcctcagcttcccaaagtaccgggattacaggtggattacgggtgtgagccactgtgcccagccctcttttttttttttttttttttttaaaaaagaggcagggtctcactctgttgcccagtcacccaggctggagtgcagttgtggggtcacagctcactgcaacctcaaactgctgggttcaaccagtcctcctgccttgacctcctgaagtgctgagattacaagcatgagccaccatacccagccaaaaaaaaaaaaaaattaagttttttttttttttattgagatggagtattgctctgttacccaggctggagtgcaatggctcgatctcagctcactgcaacctctgcctcctgggttcaagcgattctcctgcctcagcctcccgagtagctgggattataggcgcatgccaccacgcccgcctaatttttgtgtttttagtagagatggggtttcaccatgttggtcaagctggtctcgaactcctgacctcaggtgacccacccacctcggcctcccaaggtgctgggattacaggcatgagccaccgtgccccccattttttttgttttgttttgttttgttttttaagacggagtctcattccgttgccaggctggagtgcggtggtgcaatctcggctcactgcagcctccgccccgcctggttcaagtgatttctcctgcctcagcctcccgagtagctgggactacaggtgtgcaccaccacgctcagctaatttttgtatttttagtagagacggggttccaccatgttggccaggatggtctccatctcttgacgtcgtgatccacccacctcggcctcccaaagtgctgggattacaggcgtgagctactgcgcctggcccaaaatttttttaaaaagagaaaaagcccagatagagaagatagagagcgtttgggaacttgggagtaattaggtgtgactggagcattgttgggacaggataggtattagaaataaagacaaattggtgagcaggggccactaattggtgaggtgggaggattgcttgagcctgggaagtgaaggttgcagtgaatcaagattgtatcactgtactccagcctgggcaacagagcaagaccctgtgtcaaaaaaaaaaagtgatgcgattggatttatttattcattttttaaaaatttttatttactgttttttgtttgtttgtttttttaatttttagtagagatggggtttcaccatgttggcaaggctggtctcgaactcctgacctcaagtgatctgccggtcttggtttttcaaagtgctgggattacaagcatgagccactatgctttgtctgatttaaattttaaagatgtgtttttcagatccagagaacacttgcatcagaaaatccaattagccattctctactgaaacagactcttgggaggggcattggagactcagacatttatgtattaaagaatatcccaggttgatgctatgtactgtaaaatttgaggattcttttatagcagttattttgtccacagtgaagagaaacaagatcagagacagaaaagctagttaagaaagctattgtaggaatctagttaagtagtgagtgtggcatggaatagagtggtgatagtgaaaatagaagtggacagaattcagagttagaagtggttttgggatggggaatatttgctgcagtacagatgctttttgatttatggtgtagttacatcccatcctggtaaacccatcataagttcagaagttcaagataacttcttggctaacttggagcagcaactctctgttgctatccagcatctcgagaagtacgatttctttttttttttttttttctttttttaagacagagtctcactctgtctcactctgtctgcagtggcgtgatctcagctcactgcaacctctgcctcccgggttcaagcgattctcgtgcctcagcctcccaagtagctgggattacaggcgcacgccaccatgcctggctgattttttttgtatttttagtagagacggggtttcatcatgttggacaggctggtcttgaactcttgacctggtgatccgcctgcctcggcctcccaaagtgctgggattacaggcatgagccacagtgcctggcctcttttttatttttttaaaaatatttttaatagagatgaggtcactctgtgttgcccaggctgatcttgaactggactcaagggatcctcccaccttggcctcccaaagtgctgggattacatgtgtggtgagccactgcacccagctgagaagtacagtttctactgaatgtttatggctttcataccaccataaagtcaaaattataagttgaaccatcatacatcagggaccgtctgtagtcactagagaatggaaacgttggagaaactgacaggcaatatggagtgttcattgagttttggggattgtgaatttatagcagcttaccattctatatgtaagggagtttggatgttttcctaatggctaggaaagaagtaccactgaaggcttaaatgtgggggatgaattgtgggtgaggcacaaaggaagactagaggcagaagagctgtttagaggttgttaggatagtccaaggagcatgacgatggtgcccctaaagaaggttcatacttgttggaatggcaagatgtgggacagattagagagagattctagtgtactaacaaccccttcattgattgaatgtggaacctaaattaaggagtcaaaggaggccaggtaccttggctcatgcctgtaatcacagcattttgggaggctgaggcaggtggattgcttgagcccaggagcctgagacccacctgggcaacatggaaaaatcctgtctctacaaaagaaaagtagaaaaaaaaattatccggtcttggtggcgcaggcctgtggtcccagctactgaggaggttcaggcaggaggatcatctaagcccagggaggtcaaagcagtagagctgtgatcactccacagcactccagcctggacaacaaagtgagaccctgactcagaaaaagaaaaaggagtcaaaggaatgtgcaggttgatgaatggtgttgaatggtgttaactgttaaggaagggaccccaggagaagagttctggaaggacagttgtgggttaggttttggatgttttgagatcgagaaggtgtgggacttttaggtggtgatacctggtaaatagtttttgattcctaattgctcatacctttctgagttctcatttcatttttgagtttttccaattctgattgatgttctttcatgccttatataattttcttaatgtctttttagcttattttgaaatagaagttgcaattttgatatgatatgcggatgtctttctggcatgctttcattgtctgtaggaatgctattattttttcttattataactttatgggatttaacttctgtattttctgttcatttttatgtaaaattagttttcctggtcttttcgaaggaagcatgatttagaatagctttttctaacttcacagagctgcttctgttgtttttctgtggtggtgagaaatatggtggcttgctttctgagatttgttgcttttgttccctttcccagcttgttctggaccatccctgtcctactgaatttggtcctgctctcaacagtttctcttctaggaactcccttctagggacagtgtagggccctgtccccagaaggaagccctggcagccaggtcagcttcatcccttcagaccttttttttttttaagacagagtctcactctgtcgcccagactggagtgcagtggcgcaatctcagctaactgcaatctccgtctcctgggttcaagcgattctcctgccttagcctcctgagtagctgggacctcgtgtgtcaccgtgcccagctaatttttgtatttttagtagagatgaggtttcaccatgttttccaggctggtctcgaactcctgactcagatgatccacccaccttggcctcccaaagtgatgggattacaggcatgagccaccgtgtgtggcccccttgctagttgtaagtgctgttctcagttttgactgttgtgctttcccttgactgcctgttgattatttcagtgttctcctgttctcaggtccatttgctttctctctgctttctcctgcgtggacaccagtactatacaggtcctacagctgttggtgctttgttatgcacttacattttgggtcttgggggatacctggtaacttaactttgttgcagtgttgtctgaaggttttggtttcttttttattttttgagacagagtcttgctgtcgcccaggctggagtgcagtggctttgccttccagattcaagctattcttgtgcctcagcctcctgcgtagctgggattacaggtgcgtgccaccatgcctggctaatttttgcatttttagtagagacgcggttttaccatgttggccaggctggtctcgaactcctggtctcaggtgatccacccacctcggcttcccaaagtgttgggattatggacgtgagccactgtgtctggccagggttttggtttgggtctcggttttgctgtccagagctctcattccatgtggagatttgaagagagataaaactgtgccactgccattttctgagagtcttccaagaattcttttttttttttttttggcaaatgggtctccttattttgcccaagctgagcttgaacttgaacttacaatcctcatcagcctcttgaatagctgagacaataggttcatgccactgtgcctggccaaaaaaacttgttaaagaaatttgactgagggaaggctgaagagatggtagttggagaggtagctttgagatcaagaggtgatttggatgttttttaaaaagttaggagagtatcaaataaggtcaaagattgaaaaaaagaaaagaaagggggaaaaaagagagggaatagataatgatattgagtactggtatttttgactgagtatatgagaaaaagtaggaaccagacaagattaacatcttccattgtaattacagagaagtgggaaggaaaggtatgtgcaaaggaagattagaaaggagggaaaagctgggtgcggtggctcacgcctgtaatcccggcactttgggaggccgaggcgggcagatcacgaggtcaggagatcgagaccatcctggctaacatggtgaaaccccgtctctactaaaaatacaaaaaattagccgggcatggtggcgggcacttgagcctgggcgacagagcgagactccgtctcaaaaaaaagggaaaaaaaagagggaatagataataatattaagtactggtattcttgactaagtacatgagaagatgtaggaaccagatgagaagtatcttccattgtaattacaaagaagtgggaaggaaaggaagttagcgttcctttctgtgttttgtttttgtgaaatagaaggatagagcaggacaggcacggtggctcacacctgtaatccaagcactttgggaggccaaggcaggaggattgcttgagcccaggaatttgagaccaatctgggcaacaaagtgagaccctctctctacaaaaaatcaacctggcgcagtgatgtgtgcttatgtcccagctacttgggagcttggagtgggaggatcccttgagcccaggaggtcgaggccacagcaagctatgattgcaccactgcactccaccctgggtaacagtgtgagactctcgaaaaaaacaaaagaatgacatctgcttcaaaaagtaagagtgtgtgcgtgtgtgtgtgtgtgtgtgtgtgtgtgtgtaaccccctttggcaatggagtagtctgttgtaggcctggagaaagcagacatttgaattgatccagttccaggcatatgggagtggcaagagaaatgggatgttactagtagtgattgaaatgaatgagctatggagtctagagagagaagaaagtgaatgtgagaaaggactgataggcagaagttagaagcatcaagggaatggatgcattgaaaaattagagacgagacagtaaggaaacaactaggaataagaggcatttttttaaaaaactgctttattgtggcaaggcgccgaggctcatgcctttatcccagcactttgggaggctaaggcaggcagatcacgaggtcaggagatcgagatcatcctggctaacacggtgaaaccccgtctctactaaaaatacaaaaaacttagccagatgtggtggcgggcacctgtagtcccagccactcgggaggctgaggcaggagaatggtgtgaacccgggaggtggagcttgcagtgagccgagatcacgccactgcactccagcctgggcgacagagtgagactccctctcaaaaaagaaaaaaagaaaaaaaactgctttattgagatacaattcacagaacgtacagttcatttatttataaagtgcataatttagccaggtgcgtgcctgtactcagctactcaggaggctgaggcaggaggaatggtcggcccaggagttcgagaccagcctgggcaacatagtgagacctcatctctttttatttgtttgtgtgtttgtttttgagacagagtcttgctctgtcacccagtctggagtgcagtggcacaatcttggttcactgcaacttgaccctctggggttcaagtgattctcgttcgtcagcctcccggatagctgaggttacaggtatgtgccatatgcctgcctaatttttagtatttttagtagagatggaattttgtcattttggccaggctggtctcaaactcccagtctcaagtgatctacccacctcagcttcccaaagtgctgggattacaggcgtaagtcaccacgcctggcccgtaagaccttatctctataaaaaataaaaaatttagccaggcgtggtggcgtgcacctgtagtcccagctacttggcaagctgaggcaggagaattgtttgagcccaggaggtcaaggctgcagggagctgtgatcataccactgcactccagcttgagtaacagagtgagaccttcatctcaaaaaaaaaaaaaaaaaaaaggaaggaagaaacccagttctcccatccttcccgtagcctcaagcaaccgcaaatctactttctgtctctgttgattttcctattctggcctttcatatgaatggaattatgtaatatgtagatttatgtgtctggcctctttcagtataatgttttcatctgacttgtagcatgtatcagtacttcattccttctttctgcctccccaccccagctttattgaggtataactcacaaataaaaattgtatacatttaacacatacagtgtggcatcttgatatatgtgtacattgtggagtaccacagttaagctaattaacgtatctatcacctcacctagttaacctttttgtatgtgtgtgatgagaacaccgaagagctactctcagcacatttcaagtttacaatatgttatttatttttattttacatggtttaaaaagagacagaacctttgtcacccaagctggagttcagtgatgcagttatagctcactgcaacctcaaactcctgggcttaagcaatcctcccacctcagcctcctcaatagctgggactacaggcgtgcactaccatgcccagctaatttatttatttgtttttatttttattttttttttgagacggagtttcactcttgttgcccaggctggagtgcagtggcatgatctcagctcactgcagcctctgcctcctgggttcaagcggttctcctgcctaagcctcccaagtagctgagattacagtcatgcgccaccaagcccagctagttttgtatttttagtagaggtggagtttctccatgttggtcaggctggtctcgagctcccgacctcaggtgatccacccactcagcctctcaaagtgctgggattacaggcgtgagccaccatgcccagccgcccagctaatttttaaacaaattttttgtagaggcaaagaatcgctgtattgcccaggctggtcttgaactcagcttcaagcaatcctccagcctcagcttcccaaagtattaggattacaggcatgagccaccatgcctgaccaagtatacagtacgctattattattattattttagacagtcttgctctgtagcccaggctggagtgcagtgttacaatctcggctcactgcagtctctgcctcccaggttcaagcaattcttctgcctcagcctcctgagtagttgggattacaagcgcccaccaccacgcccggctaatttttttatttttagtagagacagggtttcaccatgttgcccaggctggtctcgaactcctgacctcatgatctgcccacctcggcctcccaaagtgctgggattacaggtgtgagccaccacgcccaaccagtaagttattattaactatggttaccatgctgtacattaggtctccagaacttataactgaagttttatatccttttaccacgatctcattttcgctacccttaagccctagaaacccccttcctactctctgtttctatgagtttgacttgagatcatgtggtggttatctttctgtgtctagcttattttacttagcatagttccgtctaggttcatccatttgttgtcacaaatgtcaaaattttttttttagggcagaattagattccattgttcgtgtgttccacattttctttatccattcacccaacaacagacacgagttatttccatagcttatttccatcttttggttattatgaataattctgctacaaacattagtgtacatgtttttatggggacatatgttttcacttctttttgactatgtacctaggaatggaattgctgagtcatgtggtaactctgtaatcatttgaggaactagaaccgccatactgtttccaaggtgctgcaccattttacgtgactagcagcagtgtatgagggttccagtttctctatatccttaacagcacttgttgtgttatttacccaggtgcatgcctgtactctcagctactcaggaggctgtggcagtaggatttcttgggcccaggagttcgagaccagcttgggcaacatagacctgtctaaaactttttttttttggcggggcacggtggctcacgcctataatcccagcactttgggaggccgagtcagacggatcacttgagatcaggagttccagaccagccttgctaacatggcgaaacctcgtctctgctaaaaatgcaaaaattagccagccactgtggcacgcgcctgtaatcccagctattcaggtggctgaggcataagaatcacttgaacccgggaggtagaggttgcagtgagccgatttgattctagatgtcctattaggtatgagatgttttctcattctgatttgcatttccctgatgactaatgatgctgagcgtttttttttttttttttttttggtgcttattggccatttgtgtatcttccttgaagaaatgactattcagatacctaggcaattttttaaaaattaatttttaattattgtttttattttttttagagacaaggtcttgctgtattatccagagtggtctcaaactcctgggctcaagcaagcagtcttcccacctcagcctcctcagtagttgagactataggcatcagccaccacacttgatctttgcccaaagtagctgggattacaggtgtgcgctgccatgcccggctaatttttgtatttttagtagagacgaggttttgccatgttggccaggctggtcttgaactcctgacctcaggtgatctgcccacctcagcctcccaaagtgctgggattacaggtgtgagccactgcgcttggccatttttttttttttaattgagatgtaagagttctctatatattctgtattctagatgtaagtcccttatcagatatgatttgcaaatatgtgttccctttctgtggattgttcactttctttatagtgttctttcaaggacaaaggttttagttttgatgaagcctggtttatgtttttccttttgttgcagatgcttttggtgttaggtatctaagagtcatttgccaaactgagagtcatgagtatttactcctgtgttttcttctaagagttttatagtttcaactcttaaatttaggtctttgattcattttgagttagtttttatatgtggggtaaagtaagggtctaacttcattctttttgttttttgagatggagtctcgctctttcacccaggctggagtgcagtggcgctatctaggttcactgcaagctctgcctcccgggttcatgccattctcctgcctcagcctcccgagtagctgggactacaggcacccgccaccacgcccagctgattttttgtatttttagtagagatggggtttcaccgtgttagccaggatgatctcgatctcctgacctcgtgatctacccatcttggcctcccaaaatgctgggattacaggcatgagccactgcgcctggccaacttcattcttttgcacgtgacgattttggtccatgactcgggtgtttatacgtaaggttttattttgttttgttttgtttttttgagatggagtctcattctgtcacccagcctggagtgcagtgtcgctatcttggctcactgcaacctctgtctcctgggttcaggcgattctcctgcctcagcctcccgggtggctaggattacaggcatgagccaccacgctcagctaattatatttaaggttttaaaagtggagcagttttacttataataaagcatagcagttctaggtaagactggtttggagtgcagccatggaaatggatggctgaagtgcaggtgaagactgacctcagtgctaaagtcttcctgtcaacgacaggcccgtggcctcggaggagccggggtttattaaaatgaggctagaggagttagatctgaaagagacattgagaataaggataccaactccatctcttagtctgaaatatgtgggaagtagaagaatgagctaaaacttctgtattagaatttttcaaaggaacagttccttcagggtggagctagtaagaattggaaagagtacactgaaatggtgggtgatgtaggggagtttgtctcttctggaaaaaggttttgatgacatccctttgccaaagcagtgtgaccgtgtggtagcaccttggcttcagttagactaagctttgactaatttggagcctcctcagtactatgctatttgtatctgttctgccctggaaacaaaattagtttttcacttaaaataaagttgccttatttgacatcctaccacagatcagagggtggagcataaaacaagctttccttattaatcatgtgataatactatttaaaggtatttgaattaaatcagtacgtgtgtgtagggagatggagaattaaagtcacatacaccaagttattgtaatttctgcttgaaaatcttcagggaacataggatcaaggaaagaactgaatgattgccacctacccatcctagtcttgaggaggaaaaacttcatgtaattaagggaaatgggaagaatcaatggtgctcagttgttaaaaagctataggtaaaggcttgattctgatagtgtgggtatagtcaaacagtctccctctattctgttacctttctgagagtcctaacccaaaacactcaaggccaaaatagttaacctttgaacggccaggcgcggtggctcatgcctataatcccagcattttgggaggccgagacaggcggatcatgaggtcaggagatcgagaccatcctggctaacacgatgaaaccccgtctctactgaaaatacaaaaaataattagccgggcatggtggcgggcgcctgtagtcccacctacttgggaggctgaggcaggagaatggcatgaacccgggaggcggagcttgcagtgagccgagatccagccactgcactccagctggggcgacagagtgagactccgtttcaataaaaaaaaattaaaaaaataaaatagttgacctttggacaacatgggagttaagagtgcctatcctgtctgggtacagtcactcatgcttctaatctgagcactttagtgggccaaggcaggaggatcacttgagtccaagagtttgagactagcctggacaagaaagcaagaccctgtctctacaaaaaaaaggacaaaaattagctgggcatgatggcacgtgcctgcagtcccagctactcaggaggctgaggcaggaggatcactcgagcccgggagtttgaggctgcagcaagccatgatcacaccactacactctaccctgagtgatacagtgagaccccatctgttaaaaaaataaaagggggttggccgggcgcggtggctcacgcctgtaatcccagcactttgggaggccgaggcgggtggatcacgaggtcaggagatcgagaccatcctggctaacatggtgaaaccccgtctctactaaaaatacaaaaaattagccaggtttggtggcgggtgcgtgtagtcccagctactcgggaggctgaggcaggagaatggcgtgaacctgggaggcagagtttgcagtgagctgagattgcaccactacattccagcctggacaacagcgagactccgtctcaaataaataaataaataaataaataaattaattaattaattaattaaaaggggctgggcgtggtgcctcatgcctgtaatcccagcacctcaggaggccgaggtgggcggcttgcctgagctcaggactttgagaccagcctgggcaacatggtgaaaccttatctctactaaaagtacgaaaatagctgggagtggtggcatacgcctgtagtccctgctactcaggaggctgaggcataagaattgcttgaacccaggaggtggaggttgcagtgagctgagatcgcgccattgcactccagcctgggcgacagagcaagactctgtctccaaaataaataaataataaataaaatataaaggacacctatccctgttgcagtaagaattccaagtataacttttgactcacccaaaacttaactactaagtcaactggaagccataccaataacataaacagtcagtgaatatgtattttatattttatgtgtattatgtactgtactcttacaatgaagctagagaaaagaaaatgttattaagaaatcattcactattaaggaaacatactattcagtggaagtggatcatcataaaggtcttcatcatctttgcattgagtagacttcagaagaggaggggttgatcttgctgccttgggtgacagaggcagtggaaggagaggcaggcatacttgctgcaacttctattgaaaaaaaatttgcgtagaagtggacctgagtagttcaaaccccttgttccagcgtcaactatacccagatgctgagcagggaaaaatgaggaagagggattaattggcttgtctgggccaatcaggctgactcagctctatttgaagagatggcagaaacttagagtttgagagtttctcaatcaggaattcaggaatctcatgttgagcctctttgaccagattattggggccagcctgggtcttgagtgacagggcagtctggttcagttcaagtatcagacccagtaggtgagtgagagaccagtgtacatacatctaccaggtttcagatgtaacccaccaatgaagactagaccacctttccttgaacccatttctctgtgttctcgtaggcctccctagccatagctctgcctccttaggtccaaatctggggaggacaaggagaggagagtaaccctattctaaagccagttcccttatcatgagccttagctgctgccttttcctacctagaactagccacacgtccatttcctggccctttctaatggcctaatgatcctttgtgtgtagacccagcactttctgtgtcatgaacagtgttacccaatcttgatgtggtaaaagagggaagaagatagtaaaaagagagagagagcacttggactaatttttttcatttctgaaatgtgatggttgtacaagttgtcctttaaggttttttaggtcaaatttttgtaattatgtgattctggatatgttctggctgcaggaattttctgctgcagaaaaccagtactcataggcattaaaaaaagctaccattttccagcttgaggataagtgcattgggaaatcatggagtcattatcaagagtttgcacatctggttgggcgcagtggctcatgcctgtaatcctagcactttgggaggctgaggcaggaggttcgcttgagctcagaagtttcagaccagcctgggtaatgtggtgaaactctgtctctacaaaaaatacaaaaattagttgggcatagtggtgtacatctgtagtcccagctacttgtgggggctgaggtgggaggattacttgagcccaggaagtcaaggctatagtcagttgagatcacaccactgcactccagcctgggcgacagagtgagaccctgtctcaaaaaagagttgcatgtctactcattcagttctcattatctatagactaaaatatacatctccccccttatgtactactatttttgaatatatgtaaattaataaaatgtaaacttaaagtgttattgaatgtataacagtttgttgttttttgtttgtttttgagacagtctctgttgtccaggttggagtgcagtggtgcgatctcggttcactgcaacctctgcctcccaggttaaagtgattctcccgcctcagcctcctgagtagctgggactacaggcacgcacgcatcagttcattgtgtgtttttttttttttttttttgagacaggatctctctctgttgctaagactggagcgcagtggcacaattatggctcactgcaacctctacctcctgggctgaaatgatctcacacctcagcctcccaagttgctgggactataggcgcacaccaccattcctggcgaatttttttttttttttttttttttttgacagggtctcactcttttgcccagactagtatcagtggtgcaatcttggctcactgcaacctccacctcctgggtttaagcaattctcttgcctcagcctcccaaatagctgggattacaaattcatgccaccatgtctggctgatttttgtatttttagtagagacagggtttcaccatgttggccaggctggtctcaaactccggacctcaagtgatccacctacctcggcctcccagagtgttgggattacaggcgtgaaccactacatccagcctagcagttgtttgtcattgtatgttttctcagtgaatatctcatggggatccatgaaaatttttagatcctaaaaaggggtccgcataatcaaaaaggttgggaatttctgctctaagccattttgagatgggagagttcacaacttacgtcaaagtatagttattaggcactgcatgtttaagagacaattcatgggccaggtacagtgttcatgcctgtaatcccagccctttgggaggccaagggaggaggattgcttgagctcagcagtttgagaactgcctaggcaacatagcgagacctcgtctctactaaaaataaaaaaaaatcagccaggtgtggtggcatgtgcctgtagtcgcagctacttgggaggctgaggtgggaggatcacttgagcccaggagattgagattgcagtaagccatgattgtgccactgcactcctgggcaacagagcaagaccctgtctcaaaacagaaaaaaaaaaaaagataattcatggagagagagattatcaaggaagattaagctcctcttatatgttaggtatcgtatagtaagtctcccttccattcttatcctctgggcccattagaggctgccgctgtttttttgtttttttgttttgctttttcgagatggagttttgcttttgtcacccaggctggagtgcagtggcacaaacttggctcactgcaacctccgcctcccggctaatttttgtatttttagtagagacagagtttcaccatgttggccaggctggtctcgaactcctgacctcaagtgatacgcctgcctcggcctcccaaagtgctgggattacaggtgtaagccactgcgcccagcctgccacttttaataattcttgcatatgttccaggaatacctatgtggatatatatgtatgtatgtgtgtattttttttaatgtgatatttttaaaatagtgtcttttttttattattactattttttgcgacagagccttgctctgtcgcccaggctgaagtgcagtggcgcagtctctgctcactgcaagctctgcctccctggttcaaacgattttcctgcctcagcctcccgagcagctgggattacaggtgcctaccaccaagtgcggctaattcttatatttctagtagagatggggttttgccatgctggccaggttggtctcacactcctgaccgcaggtgatctgcctgcattggcctcccaaaatgtgattacaggcgtgagccactgtgccaggccaaaataggatctttattttctagaaatatgggtaagaatattgatttgtttgcttttcagttctatgttgtactaaaaatttattgataaatgtattcctaaagagtagaaaattgaaatgcagccaggcacggtggctcacgcctataaacccagcactttgggcggccaaggcaggcagatcacgaaatcaggagttcaagaccagcctggccaacatggtgaaacctggtctctactaaacatacaaaaattagccaggcgcggtagtgggcgcctataatcccagctatttaggaggctgaggcaggagaattgcttgacccctggaggcagaggttacagtgagctgagattgtgccactgtattccagcctgggtgacagagactttgttttggggttgggggcaggggtgggaattaaaatgcaccgttcagatcttatatgcatcgctgacagggaaacttttttcagggtgaagaaggtgaatacagtgaagaggaaaactccaaagtggagctgaaatcagaagctaatgatgctgttaattcttcaacaaaagaagagaagggagaagaaaagcctgacaccaaaagcactgtgactggagagaggcaaagtggggacggacaggttagtacattccacagtcctccattttagaggctggaatagagattcttgaggcttggaagagtaaggatccctttatctgtcctctaggagagcacagagcctgtggagaacaaagtgggtaaaaagggccctaagcatttggatgatgatgaagatcggaagaatccagcatacatacctcggaaagggctcttctttgagcatgatcttcgagggcaaactcaggaggaggaagtcaggtaaaagccacttgctgctgctgctgtctaacatgtattttacacatgtaggccaggtacttcgatttgcctgtatttcatttattacagcattttaagataagtattatgattatccttatcgtacaaatgaggaaagtaggcttagaatatttggtaactcttggtgaggcagctaagatacagacctaggacagtttgtttccagaactcatcttctcttaattattatacttttgcttttcttagtctgaggtgtaaggcgtctgagaagtgaaatacttgcataggttgccttttaggagaaaggagatgtttcaaaggtactgaatggcatgaaatgaagtctttttctcatttctgtgtctgttatatttgagcccagcaggccctgaggttctgtgattcacgcttgctttggggaggcctgttttttataatctctttgggatgatgaggagactacgtaaagttcctattgtccccctgcctccctgacccattttgttcaagaacatctctacttggagaattctgctgacccaagacacttttccttcattttatccagacccaaggggcgtcagcgaaagctatggaaggatgagggtcgctgggagcatgacaagttccgggaagatgagcaggccccaaagtcccgacaggagctcattgctctttatggttatgacattcgctcagctcataatcctgatgacatcaaacctcgaagaatccggaaaccccggtgaggacattttagaacataagaccaggctgggtatggtggcttacggtggcttacacctggaatcccggcactttgggaggctgaggcaggaggattgcttgaggccaggagttcaagaccagcctggggaacatagtgagaccctgtctccaaaaaaaaaaagaaaaaaaggaaaaaaaaaatagagtgtagactcttgatatcttttagaaagaattctctttgcttttctttttatttatttatttaagacagagtctcgctgtgttgcctaggctggagtgcaatggcatgttctcggctcactgcaacctccacctcttgggttgaagtgattctcctgcttcagcctcctgagtagccaggattacaggcgcgtactatcgcgatcggctaatttttgtatttttagtagaaatgaggtttcgctatgttggccaggctggtcttgaactcctggcctcaagtgatctgcccgtctcgatctcccaaagtgctgggattacaggcctgagccaccgcgcgtagcctccttttgttaatttcctaacagtttcttcattccattttttgtagatatgggagtcctccacaaagagatccaaactggaacggtgagcggctaaacaagtctcatcgccaccagggtcttgggggcaccctaccaccaaggacatttattaacaggaatgctgcaggtaccggccgtatgtctgcacccaggaattattctcgatctgggggcttcaaggaaggtcgtgctggttttaggcctgtggaagctggtgggcagcatggtggccggtctggtgagactgttaagcatgagattagttaccggtcacggcgcctagagcagacttctgtgagggatccatctccagaagcagatgctccagtgcttggcagtcctgagaaggaagaggcagcctcagagccaccagctgctgctcctgatgctgcaccaccaccccctgataggcccattgagaagaaatcctattcccgggcaagaagaactcgaaccaaagttggagatgcagtcaagcttgcagaggaggtgccccctcctcctgaaggactgattccagcacctccagtcccagaaaccaccccaactccacctactaagactgggacctgggaagctccggtggattctagtacaagtggacttgagcaagatgtggcacaactaaatatagcagaacagaattggagtccggggcagccttctttcctgcaaccacgggaacttcgaggtaggtatcataggattggtggctagctttttcccctttgcatcatcaggtttaggggcatgggacttctgtctcaggaaggtggtgtctgacaaatgtctacttctttttttttgagacagagtctcactcttttgcccaggctggagtgcagtggcgcgattttggctcactgcaaccttcgcctcccaggttcaagtgattctcctgcctcagcctcctgagtagctggggttacaggcgcacaccaccacgcccagctaatttttttttttgtatttttatttatttatttgttttgagatggagtcttgctctgttgcctaagctagatgcagtggcacgatctcggctcactgtaatgtccacctccgggttcaagtgattctcctgcctcagcctcccgagtagctgggagtataggcgtgcactaccacgctgggctaatttttgtatttttagtagagaccgggtttcaccatgttggccaggatggtcttgatctcttgaccttgtgatcctcccaccttggcttcccaaagtgccgggattacaggtgtgagccacagccaccgtgcctggcctttttttttttttttttttttttgtgacagagacttgctctgttgcccaggctggagtgcagtggcacgatcttggctcactacaacctctgcgtccagggctcaaacaattctcctgcctcagcctcctgagtagctgggattacaggctctcaccaccacacctggctaattttttttttttttttttgagacagagtctcactgttgcccaggctggagtgcagtggtgtgatctcggctcactgcaagctctgcctcctgggttcacgccattctcctgcctcagcctcctgaatagctgggactacaggcgcccaccaccgcgactggctagtttttttttttgtatttttagtagagacggtttcaccgtgttagccaggatggtctcgatctcctgacctcgtgatccgcccaccttggcctcccagagtgctgggattacaggcatgagccaccgtgcctggcccacacctaatttttgtatttttcatagagatggggtttcattatgttggccaggctggtctcgaactcctgaccttaagtgatcgacccatcttggcctcccagagtgctgggattacaggcgtgagccactgtgccagccccagctaatttttaaaaaattttttgtagtgatgggtcttgctatattgcccaggctaatcttgaactcctgggctcaagagatcctcctaaagcgctgggattacagatggaagacactgcacctgcccggtcatcattgagcctcctgagtacaggatcattttccacaaaaagtagaagaagacaacgttattatttgaactaatggttaaatatttgaaggcagaaatttattcagttgaattttgatcaagatcttctctaatatatttgaaaggcaagcctcccttatttccttaatcttctagagacagattgcccaatagaactttgtgtaatgattgtacttttgtgtttttgttgttgttgtgtttacatagatatagtttttttttttgtttttttttttttttagatgggtcccactttgtcacccaggctagagtctggagtgcagtagcgtgaccttggctcactgcaacctccgcctccagggctcaagcaatcctcccatctcagcctcctcagtagctaagatcataagcacacatcattacacctggctgattttttttattttttgaaaagacggggggtctcactgtgttttccaggctggtcttgaactcctgggctcaagcagtcttacctctgccacccagagtgctgggcttataagcatgagccactgcatccagccggaattgaacttttaattaattgaaacttaagtgtccacatttggttagtggatatcatattgggcagcatagttttagagagtaagacctacctattacccattttgcctattgtggtttgtttttctccagccagatagatcaaaggatcttcccttagtctgaaatctaacttaaatattggaactcctcaattggagttgcagcacccttcttactattggaggacaatctctagaacattcctttttgtcttgagtcattttagccagaggagaatctcctttcaaacttccaacccagacccctgtgaatggatataatcaagtagatttacaaagcatccctcccttgtccagctgttgctcagaaactcttgggctgagatttttcaatatgttggataatgtaatgtgctaattataatctctcagggattctatgcagggaacaatttgataggaaaaaatttgaatttgattttcttcactgaagtcattttatttttcattttcaagggctttattgctatattaagatggcagacagtggggacaaatttctaaatgctggtgttgacagaaagcagagatagtttatagagaattttattagttaaaagaaaaaaggcattccttatgttgacacttaaacctgtctcttgatagtatctttgagtcccactcacgtatgtctgatctgcagaagtgacttttttggtgtattacaggtatgcccaaccatatacacatgggagcaggacctccacctcagtttaaccggatggaagaaatggtacagaaggggaaaggggtagatgggggagggagctgcctgttacacagcttgttcattgtttaaaccaagataaggtcttttttttttttcttttctttctttctttttttttgagacagagtctcgctctgttgcccaggctagagtgcagtgacgggatcacggctcactgcaagctctgcctcctgggtcccagttcaagcaattctgcctcagcctcccgagtagctggcattacaggcacgtgccatcatgcccagctaatttttgtatttttagtaaagacagggtttcaccatgttggccaggctggtcctgactcctgacctcatgatccacccaccctggcctcccaaagtattgggattacaggcatgagccaccacgcccggccaagataaagtcagtttttccattgattatgcatgtttcttttaatttggatctcctaaatgtaaggtagaaggtttaggttcaaatcttgatatcttttcattatttttcagctcactttgcaaatatccattaaatacctgccatgtaccaagtgtttttcaacacctaaaggaaggtaggacttgatatgagagccctctagaattcttattgtttaggcctctttctttgtctcagggtgtccagggtggtcgagccaaacgctattcatcccagcggcaaagacctgtgccagagccccccgcccctccagtgcatatcagtatcatggagggacattactatgatccacgtgagttttttcttactgttggggtacttttcttggcagggtgaagtgaagtaagataccaggctcctggctcctgaatttctcttctgacctcttatagtggttatcaaacattgtctggttgctgttttcttcgcatggaatattgagaacatcttttaaagggcttggggaacaaggagacttgtccatgtgaagagtaagggtttatgagagtcccaatgtgatatcttacagtgcagttccagggaccaatctatacccatggtgacagccctgccccgctgcctccacagggcatgcttgtgcagccaggaatgaaccttccccacccaggtaagctttgtgtctctgcttatatgcttccagtacctgaggatatatgttgggagtgccacaaaacccatcctcctgagctttgtgctgctagcctgggagtctggccatcctggctgcttgggcaacaagttcctcttgtgtccatcctgaggacttccattctgagcctgattatactgagcagtccagccgggccatcctgtgaaaatgatgttactttatttttcagtttttttcttctccttatccaggtttacatccccaccagacaccagctcctctgcccaatccaggcctctatcccccaccagtgtccatgtctccaggacagccaccacctcagcagttgcttgctcctacttacttttctgctccaggcgtcatgaactttggtaatcccagttacccttatgctccaggggcactgcctcccccaccaccgcctcatctgtatcctaatacacaggtgagatggctaatgatcatgtttttctagatacacattctttaattcagacaggaatgtggtatggggagaatgctaaaggaatttgagagaacattttcagtgccactgatttgtatgtgacaccaagacgcctcttagtggtcaggagctggaaatgcagcttatgtaatgcccatcatctttattcttttcagtttttttctccgttgcccaggcttggagtgcagtggcgtgatctcggttcactgtaacctccacctcttgggttcaagcgattcttctgcctcagcctcccgagtagctgggattacagtgcctgccaccatgcccggctagtttttgtatttctagtagagatggcgtttcaccatgttggccaagctggtctcaaactcctgacctcaaccgatccacctgcctcggcctccgaaagtgctgggattacaggcataagccaccgcacccagcgttcagtttctttaatggtgtttctttcctgtgttgtggtacatcataggtggcaatacctggtttttactctattgcataaagaagctgtattctactccttatcacccctacctctgtcctgcttaacttccaccacgttgacataatcaagtatctgtagtgtcgctactgaactcagccttttccatttgtcagctgatggtaggaattagagaaagctgggcagtactttgaagaaataaaaaccagagcataataatgaagaattaaggcaaaaatgaatagtcactttattttgaagggtgggcagattagatatttttaaaattataaattccccaattctcttatggctgaataatatttcctgttcatcataggttggatgaattcattcctaactttttcttctcctggcttgtggggtcccaggccccatcacaggtatatggaggagtgacctactataaccccgcccagcagcaggtgcagccaaagccctccccaccccggaggactccccagccagtcaccatcaagccccctccacctgaggtatgagagttccttcctatacttaatgcacatgctccgtcagtgggctttccttctccccagaggatttccctcattttctgggtgtgtttctctggaaaacagtctttttgttatgacctgataacaaattccaactttgttatttcaggttgtaagcaggggttccagttaatacaagtttctgaatattttaaatcttaacatcatataaaagtaagtgcacaacttactgtgaatattgttaaaactaatgctcacacttgcttaataaacaaaaatcacttaattaatgctttttttttttttttttttttttttttttttgagacggcgtctcagtctgttatccaggctggagtgcagtggtgcaatctcggctcactgcaacctccatctcctgagttcaagcgattctcttgcctcagcctcctaagtagctaggattacaggcacgcaccaccacacctggctaatttttgtatttttagtgggaatggggtttcaccatattggccaggctggtcttgaactcctgacctcaggtgatccacctgccttggcctcccaaagtgttgggattacaggtgtgagccaccccacccagcctctgattaatgctttaagttataataatcatgggatatctcaggaggcttaaaggagtcctgaaatttgccagtttgtttgtttggcaagtgtattgggcagggttgaagtagaaacgattgttaacatgacagttttcaattgggaagctacaaggaaaaaatacaggaaggcagtcaaggaaaagggaaatctaaatttgagatgttatagcagaaaaaaccagttctaaagatcatagaggagaaggactgggggttttgttgcttttgtttaaggacattacttaaaacacattatttagaagtgtggctttttgaaaacagcttgtgaatgcccagaaggcccactaacactttggtggttcttccctttttccaacccctgtcagagcagcagaggtgagaactcagaagagaaatacagctggctatctactaccagaagggcttcaaagatatagggtgtggctcctaccagcaaacagctgaaagaggaggacccctgccttcctctgaggacaggctctagagagagggagaaacaagtggacctcgtcccatcttcactcttcacttgagttggctgtgttcgggggagcagagagagccagacagccccaagcttctgagtctagatacagaagcccatgtcttctgctgttcttcacttctgggaaattgaagtgtcttctgttcccaaggaagctccttcctgtttgttttgttttctaagatgttcatttttaaagcctggcttcttatccttaatattattttaattttttctctttgtttctgtttcttgctctctctccctgcctttaaatgaaacaagtctagtcttctggttttctagcccctctggattcccttttgactcttccgtgcatcccagataatggagaatgtatcagccagccttccccaccaagtctaaaaagacctggcctttcacttttagttggcatttgttatcctcttgtatacttgtattcccttaactctaaccctgtggaagcatggctgtctgcacagagggtcccattgtgcagaaaagctcagagtaggtgggtaggagcccttctctttgacttaggtttttaggagtctgagcatccatcaatacctgtactatgatgggcttctgttctctgctgagggccaataccctactgtggggagagatggcacaccagatgcttttgtgagaaagggatggtggagtgagagcctttgcctttaggggtgtgtattcacatagtcctcagggctcagtcttttgaggtaagtggaattagagggccttgcttctcttctttccattcttcttgctacaccccttttccagttgctgtggaccaatgcatctctttaaaggcaaatattatccagcaagcagtctaccctgtcctttgcaattgctcttctccacgtctttcctgctacaagtgttttagatgttactaccttattttccccgaattctatttttgtccttgcagacagaatataaaaactcctgggcttaaggcctaaggaagccagtcaccttctgggcaagggctcctatctttcctccctatccatggcactaaaccacttctctgctgcctctgtggaagagattcctattactgcagtacatacgtctgccaggggtaacctggccactgtccctgtccttctacagaacctgagggcaaagatggtggctgtgtctctccccggtaatgtcactgtttttattccttccatctagcagctggcctaatcactctgagtcacaggtgtgggatggagagtggggagaggcacttaatctgtaacccccaaggaggaaataactaagagattcttctaggggtagctggtggttgtgccttttgtaggctgttccctttgccttaaacctgaagatgtctcctcaagcctgtgggcagcatgcccagattcccagaccttaagacactgtgagagttgtctctgttggtccactgtgtttagttgcaaggatttttccatgtgtggtggtgttttttgttactgttttaaagggtgcccatttgtgatcagcattgtgacttggagataataaaatttagactataaacttggctcccttgccagtgttttgcatgagtcttgatttgggagggagggaagaggactccctaattcccccacagggtcacggtcacaactcaggtcagcccaagttgtgaaacagaagcccagagagatgaggagcccctatgaggccataaatgtgtctgcactccccatcagttatcttttttaaccacatagatcaccaggatgtcatgccatcccttagattggaagtgtcagggacagaaaagtagtgagatgctggttattcacatgagcatctagtatcctttatggcttcctttgtgtttggcaagtaagtttcccaaggtaatatgccatcagatgtcaatataactataccaagtcctgggttggggggaagtacaggtagctagctttcttgaaaagtgaagatgctgctggccaccgtggctcacgcctgtaatcccagcacttagggaggccgaggtgggcagatctcgatcagggagatcgagaccatcctggctaaacagggtgaaacactgcctctactaaaaatacaaaaatagctgggagtggtggcgggtgcctgtagtcccagctacttgggaggctgaggcaggagaatgatgggaacccgggaggtggagcttgcagtgagccgagattgcgccactgcattccagcctgggcgacagagtgagactccgtctcaaaaaaaaaaaaaaaaaaaaggaaaagtaaagatgctgacactaaagtattcaggaccacacagtcttagagagactatcagctcaggtaaggggaagggaatttgtgtgtgtgtgtgtgtgtgtgtgtgtgtgtatttttagtagaaatttttgtattttttgtacaacaaattttgtatttttagtagcaatggggtttcaccatgttggccaggctggtcttgaactcctgaccttaggtgacccacctgccttggcctcccaaggccaagtctgagtctgtgttcttaatgtccttgccagtggctctccaccctaccagatccaaagtcacttttttttttttttctgagacggtcttgcccgtcacccaggctggaatgcagtagcacaatcataggttgctgtaacttggaactccaaggttcaagcaatcttgccacagcttcccaaatagctgtgactacaggcccacaccaccatgcccagctaatttttgtggtttgtttttagtagagacgaggtctcagtgtgttacccaggctagtctggaacgccttggttcaaatgatcctcctgtcttagcctcctagagtgctgggattacatgtgcaagccactacacccagccccaatgttcctttcttataacaaatattttgcaacactaatatcccaaagtgaaatggacagataacataacctgcctggacacatgatttcaaaaaacaaatcaactgtgggtcataattcagtttacctagtccacttggcctttgatgcttagagggcagttcctacctttgaagtgactttttcctctaggtcctgggtgggatggaagtttactacagaagctatctctggtatgggagagcaactttcatatggagctggcagcatttgttgggtttcacaaatccatacacgggaggcatagatatcatagtacatcttttttttttttttttttttttttttggtcttgctctattgcccaggctggagtgcaatggcacaatcgtggctcactgcagctttgaccacctgggctcaatcaatccacccacctcagcctctcaagtagctgaaaccacaagcatgcaccaccacacctagctaatttatttttgtagagatagggtcattgaattcctgggctcaagtgatcccgctgtctgggcttcccaaagtgctgggattacaggcttgagctgctgtgcccaactattgtacatcttataaagacagatgggacttcccccatatcttggtgctggtgccacagccagaggactgtgacttttctgagccccgtccctaattccttttttttttttagactgagtctcactctgtcgcccaggctggagtgcagtggcacgatctcggctcaccacaacctccacctcccgggtttaagcgattctcctgcctcagcctcccaagtagctggggtttacaggcgcccgccaccatgccccactactttttttctgtatttttagtagagatggggtttcaccatgttggccaggctggtctcaaattcctggcctcaggtgattggctcagcttggcctcccaaagttctgggattacaggcgtgagccaccacgctgggcccctaattcctctttaaatcatgtcagtttgcttctcttccccacaatgtgatgggtgactgtaggcctgatctcctggggttatgaaaaaatgccatccagccttgggggtgggttactggcaggaggtttgagtgttggatgcttcccctttacccttgcctcttgcttccctagtccttcagttagaccctattgctctctctgttgccctggtaaccagctctgcaagaagaaactcaagctcagcaaagcccccaggttctctctatcctcccagcctgcctctgggtgggcagaaagaagagggtgtgtaagcagcagacagatagcctgaggtggccctgcccagtccccttgtagaagcccatgggctcaaaaaaagctcaaagctttttcgcccccatctcatagttgttattcataccaccctgccttcctctttatttcttccataagcgggtgcaaatgctctgccagctctcttccccttcagggtcagcgcacagacctgctaccttgtaggcaactcggagcaccaaagacttggaattccaaagtcagctcccagcatctgcagcccacttgggttgactgtccgtctagggcagtgattttcaatcctggccatttgtgtcatgtgaggagctttttaaaaaataccataagccttcgccctggttcagaaatctgatttaattggtctgagatatggcctaggcatcagttttttttttgtttgtttgttttttttttttttgagacagtcttgctcttgttgcccaggctggagtgcagtggcatgatctcggctcactgcagcctccacctcccgggttcaagcgattctcctgcctcagcctcctgagtagctgagattacaggcaccagccaccatgcccagcaaatgtttgtatttttagtagagacagggtttcactatgttggccagactggtctcgaacttctgacctcatgttgcacccttctcggcctcccaaagtaccgggattataggcgtgagctgttgcacttggccagtattttttttttttttttaatatggagtctctcacccaggctggagtgcagtggcatgataacagctcactgcaaccttcacctcccaggttcaagcaatccttctacctcagcctccaaagtagcttggattacaggtgtgtgccaccatgcccggctaattttttttgtatttttagaagtggggtttcaccatgttggtcaggctggtcttgaactcatgacctcaagtgatctgcccgccttggcttcccaaagtgttgagattacaggcgtgagccaccaagcccagccagcatcagtatttctgagaagcttccctgtgattccagtgtgtagtcagggtgaaaaccactgccactccaggaggaccatgacttgatgctggctctcctcactgattcaaaatgttgaacttagtctctgcctgacatccttgagcatttgggggagtactggggtcctgtgtcccaagcttctagcttccagaagtctctcagtctgttttattttcaaccccctacacccttcacactccccaattcgcccttcctaaccaacaattcccaaatcctgcccagagagaaggttaccaaggcaaccggcttaatctggtaactgtggcatgtgctgggagagaagcccttccctcttcctattcagttcataaaatgctacctggggagctccaacccattccagccactttcccctttcaagccaggggatattggagtgtccaataaggggagcacaggaagctgatactcagacctctaatacagcttcttagccaaaattgtgcgctgtcttctttttactgtttccaaatccacaaacagatgggtgtgcaaagctttatttctgtgaacacatgctctagcacacatgggaacagatatgcacatacattgatacgtatgtcatacacaccctgttcagttttactaccactcccagccattagcattcctgtctctgcctggttggtgctcggtaaacaggggtggggcattgtccagagagcctcaacccatcgagaacctgctgccactcccacaccttgtaagtctaacctggatgttctcacacttagcatggctttacgatgcacccccctcctcccccacactccttctggggcagcatatccttaaggacagaatgctcctggtgtgggcatcaggagtaaggattacttggagtgctaattggcaccacttttcccactccatggccatgtacacttgggctctgtgcttgatgatagtcggcagttctggggcttgtcacctgtctccatggccctgcttccttctgctgccagctgggctcaggtgcccttgtgctcctggtctcctccccactgcctattatcccctcctcaccccagctagacctgccacaacctgctgctccctgcctggctcctacctgcctgccagtacctgcccacagaccaggcccacaccacctattgtgccctaccagagaggacagatgggcaccgcctccagtggcaatgctaattcacccaagaggccttcccagctcttctcacagaaggaagataaactccacatatttctgtgagtatgagaaaggtgcacactcttgggttcagcaatctgtaggcctgacttgggtacacaggtaggtgagtgaaggtgtccaggccacagacctgtcctgactctttgaaatgatgctgagacccggttatcccttgagccaggaatccttccccattggtaaatctctgacttacctttgcccttaatttcttctgcttagaacccaagtcccttactgtttccctcgcggtcaaccccagcgcgcgagttcaagcctcgtgcggcgcgggggcgagccgaggaagggtaggggcggggactgggcggggactggaggagggggcgcggtctcggttctgccaccttccccctcttcacggccaggagcgcagccgccgccgccgccgccgccgcgtcctctcagccttgcgctccgcccgctgcctctgccgccgcagcgcagagccgggcgcaccggccccgcagcctgcccactcttcgggccgcgtgccggctgcagccggcatggggggttgctgagagcgagcactcctttcctctggcacctcccccggctactggccactggactctggccagcgaggctcggcccctctggcccccagtctggcgcctggcacggccctctactctgctcctccagctctgagcatcgtgtcttcgccgccccccccgcccgcgcctgggatacctgggtcccccggcgacccctaggagaggggcgggggggggcatgaagccgctggagaaatttctgaagaagcagacgtcgcagctggcgggccgaacggtggcgggaggtcccggcgggggtctggggagctgcggtgggcctggagggggtgggggacccggcgggggcggcggtccagccgggggacagcggtcgttgcagcggcgtcagagcgtgtctcgcctgctgctccccgctttcctccgggagccccccgccgagccggggctggagccgccccctgagaggaaggaggagagccggcgggggtcgcggaggagccgggcagcggggggccctgctggctgcagctggaggaggtgccggggcccgggcctctcgggggaggggggcccctgcgctccccttcctcctactcatctgacgagctgtccccaggcgagcccttgacttcgccgccctgggcccctctgggcgcccccgagcggcccgagcatcttctgaaccgggttctggagcggcttgctggaggggctaccagggacagcgccgcctcaggtaaggagccggtgggctcgaacacccagagcaggggctggccccggctcctcttccttgcccttggagcgtaggggtggcgccgtgccggggcttggttatagggttgagtggtccgcggaagccggctaggggcctagcggaggtacagaccctcccgcggaagaggagagcagtactcaccttcctccctacagcagcctcaccctcgtctggagaagcagctgagcctcttactctccttcagccacccttcctttcccctgggcattggagccactgactcccatgggtccctgatgttgaatacctcctcctgtggccccaaattagggcctgacacattaaaatgggagctgcccagcgcagccatgccacccgccagaggtgctttagccctgaaaaccctggggtccctgactgttcagaggcctacacagcgcaggctgacccacccagggaggcagtgccagacaggcacaggccccaagctgccttttaggcatcagcaaagggatgcgttgtccttagcagtttggtgggggggatagtattctccttgggctggactcagaaggtgtctgggaggggagaggtggctgggccggcatcatggccctgcagcatccagggtgtccaagcgcctccagcttccacccttcggtggcaggcctcagcacccggcttttttttttttttcttttggagatgtagtctcactgtcacccaggctggagtgcagtggcgccatctcagctcactgcaacctccaccgcccaggttcaagcgattctcctgcctcagcctcctgagtagctgggactacaggcatgtggcaccacgcctggctaatttttgtatttttagtagagacaggggtttcaccgtgttagccaggatggtctcgaactcctgacctcgtgatccacctgccttggcctcccaaagtgctgggattacaggcgtgagccactggcctggctaatttttgtagttttagtagagacggggtttcggggtttcaccaacttggtcaggctggtcttgaactcctgacctcgttatctacctccccccacccccaccccacggcctcccaaagtgctgggattacaggcgtgagccaccggacctggcacacggcctctttaaaatataatcaccacaccctgagaagcttattccctaaatgatgatactatttcaccactccctttcagcacccctactaaggggcctttgaggaaaccaaggccccaaatctggttagttctgaggtagaagaccgagggttctttaggtctagctctaggcattactctaagcccaggagggtctgaggtttgggagccccggctgaggccctaatggtgagggctttcacacttgctctcagccctcggcagggaaccccaacctagatgtgtggaggggggctccactctcctagatccttctcaagacctgggtcctctcctttggagcaggctgtagttgccctggggagctgacaccttttggatttaattagaaaaatatcagacacacacagctctcctaaccataacttcccgcctacaccacacaccctgtgtctctatgacacattccctagggaggctgtacattggcccagagcctgctttggaaaagacagatgcccaactgtggcccccatatcagcatctccccaactctgccccatcttactcttcctttgctccagcttaggaatcctgtgagataaagtctatgaaggatgtcaggcctctcgtttcctcaccctcatccctgaagctgggggtcagagctggaggctctctgactcattgtaagaacacagcagggtagctgggcagggaggaaaagggagaagctgtctttccccttttacaggggcctggtgccacacgctccgctcattctcccctggggtaagactcctgaaatgtcacccatgttatctggcagcctggatccccagagtaactagtttgggaaattccaaaccagtcccaggtgaatgagaatcagcttaacctgccactctgatgttctccaataaaaccaatgttctcaagtcatcctggtctcctcccagggtgtgtgggaggagagaacttacagaagttactctgaacctaccaaagcctctccaacgtccaagcagccccctctgaccgctaggttttaccctaacactctgcttgcctcaggcatattgagaaaaggacaaagactcaggattctgggttcttattccagctccaggcaagtccctcccagctctgggcctcagtttcacatttgcgaaatgaaatccttgaagtcaattactttgtgttggttttcctcctccgcctgcatggctagaactgaccacaggagatagtgaaccaaggggagtcagaagccttggttttgtcctgggacagtgcctggggacctggccctaaccagtcctggtgaggacacctggctccctccctgcaccttgtctgtctgtgtgtgccaggtggccctgccccaccccagggctggctgcaagtcagggcgaccttgtacccggctgactggctgagccaggcccagacgggggtgtggaggggaaaggggtggtgagaggagccgctccccttcaccattccatcattaacccttctgtctctgggcccctaaaggacacaggatttctatttaaaggttctgggatcaaagtgatggcagtctctccatctcccttttaatcaggctggttcccacctgcctagttagaactcaaagctgttaggtgggaaatggggaggggaagagggatacacacacatgcacacacacagtccccactgatgctaacctctgtgtttggaaatactctttgtctggagacacttctgtgggctacttcttttttcaggcagaactcaaccttggtgtgttatctgaccaacttcccacatacgctgaagagaagtgcacatggccatcaaaggcacgcgccccccccttcccttcagctgccttggcagctgccgaacccaccctcgcagtggctgcccagaacctttacacatgtatgtgtgcgcgtgtgcagagcatgacaaggcaggtggctggggctccagcctggctaaagagaacttgcccttaggggcaagagagggaggcactgcatttccagtttcgttctggaagtgcccacctgacatctgtggtgcccactgatctttacagatatcctgctggatgacattgtccttacccattctctcttcctcccgacggagaaatttctgcaggagctacaccagtaatatccttttgtggagtttggaaaaggagaggtcagaagggagccactccctccgtcccacatgcaatctcagagcctaaactctcccctaggaaacatacctggggccgagtgcagtggctcacacctgtaatcccagcactttgggaggctgaggcaggcggatcacctgaggtcaggagatcaagaccagccaggctaacatagtgaaacaccatctctactaaaaatagaaaaaattagccaggcatggtgccacgcacctgtaatctcagctacttgggaggctgaggcaggagaatcacttgaacccgggaggcaaaggttgcagtgagccgagatcgcgtcactacactccagcctgagtgacagagtgagactccatctcaaaaaaaaaagaaaagaaaacatacctgggtttcagtcccagcttttctactcatcagctgtgtgacttgtacagattacctaacctcatggggactcagtttccttttctgtaaaatggaggtaaatagcacctgccctgcctatctattagctgctatgaagatcagtctgatagcagatgtgggagtgctttggaggctgcagagccctgtacaaatgaaaggtgttatttatttatttattttgagatggagtcttgctctgtcacccaggctggagtacagtggtgcgaccttggctcactgcagcctctgcctcctgggttcaagcgattctcctgcctcagcctcccccatagctggggactacaggcgcacaccaccacacctggctactttttgtattttttggtggagacggagtttcaccatgttgcccaggctggtctcgaactcctgacctcaagtgattcgcctgccttggcctcccagagtgctgggattaaaggcgtgagccactgcgcccagccaaggtgttattattctactaagggcacctctatccccactgaattattgctctaaaacatctggttgcccagtgagttatgatggggtctgatgtaaacatcaggccatggttgtgcttcagtagggtccgctagagaggagccactggatgggctattcatagggtctcatgtaagcatgggcctctcacagagttattttaggacctaattgtaaatgtcagaccactgagtagaatgttacaggctcccagccaggcacggtggcatatgactttaatcacagcactttgggaggctggggcgggtggatcacttgagggcaggagttcgagatcagcctggccaacaaggtgaaactccgtctctactaaaacacaaaaaattagccgggtttggtggcaggcacctgtaatctcagctactcaggaacctgaggcaggagaatcgcttgaacccaggaggcagaggttgcagtgagctgagatcatgccattgcactccagcctgggcaacagagtgagactccctctcaaataaataaataaataaataaataaaagtaacaagctgtcttagaaacatcaggccttccagtgaggtatagtcaggtttgtggtaaacaccattggcatttattaggcgcactgtgagctccaggccctgggctggtcagaggttggatgggtctgggcagggtatcctcaagtgaaaatctaacctgtctaacctgcaggagctggatgtggtcaagtggtcatcgctacctactctaagcaaaagcctgggctggggcatgaggaggtcttggcttcaggaccaccgaaactcctttctctctggccccaaatctagagaatacttgggggcaatttagcctcccatctttcttttcttttcttttcttttttttttttttttttgagatggagttttgctcttattgcccaggctggagtgcaatggcctgacctcggctcactgcaacctccgcctcccgggttcaagtgattatcttgcctcagcctcccgagtagctgggattacaggtgtacgccaccactcccagctaattttttgtatttttagtagagatgaggtttcaccatgttgaccaggatggtctcaaattcctgaccttaagtgatccacctgcctcagccttgcaaagggctgggattacaggtgtgagccaccgcgcctggccttttttttttttgccttttttttttttttttttttttttttgagacagagtcattctctgtcgcccaggctggagtgcaatggtgcgactttggctcactgcaacctctgcctcccaggttcaaacgattcttgtgcctcagcctccagagtagctgggattacaggtgcacaccaccatgcccgtctaatttttgtatttttagtagagtcttcgtttcaccatgttggccagactggtctcgaactcctgacctcaggtgatccgcccgcctcagcttcccaaactgctgggattataggcgtgagccactgcgcccagcctagcctcccatctttcttctcaattcctcaggtctgcttgcgtagggatttttcttaacttaagggtcagctttgttcgggcaggaggcatggagggccctgaagggctgggccggaagcaagcctgtctagccatgcttctccatttcttggacacctaccaggggctgcttcaagaggaagagggggccggccacatcatcaaggtgggcctgggggaagagaaggtgggtaaacaggctattagctctggaagggggcccctgtgaaggagccatacttctcattctgggtacctggaaggaagagatgccagggggccttagcttatatggctctcctgtgcttaaaggtatggagaccttgcccggcccctgcagagagtagcccttggaatgagaccccttccttcaccttctttgtcctcctctctccaggatctatacctgctaattatgaaggacgagtccctttaccagggcctccgagaggacactctgaggctgcaccagctggtggagacggtggaactaaagtgagggggagtggggcaggggcgggaacaggaaagtggtcccctgcgttcctctactacaggggctgcctctggcctattggctgcaatatggatttgcttgtttgtttgtttgttttgagacagagtctcactttgtcgcctaggctggagagcagtggtgcgatctcggctcacagcaacctccacctcttgggttgaagtgattctcatgcctcagcctcctgagtagctgggattacaggggtgcaccatgcccagctaatttttgtacttttagtagagatgggtttcaccatgttggccaggctgttcttgaactcctggcctcaagtgatctgcctgcctcagcctcccaaagtgctgggattacaggtgtgagccactgtgtctggcttccaatatggttttatttcagctcctttctctcactgaagggtggcacaaagcactgtctccagtcacttttttgtccattctcccattcatttgtctgataatccagtggtgtactggtaaatatttaacaaccagtgctgcaggagaaagagccctgatttgtagcttttgctgattcctacagtgtaaactctgtcaccatggctgatttcaagctaccaatgtgacaacactgaaagaggagttgggaagagacatgcagcacaggctgttatgtagtatctccaccatacagtagatgtagtaaaaggtagtaaaatggctgggcaaggtggcttatgcctgtaatcccagcactttgggaggtcaagatgggtggagcacttaaggtcaggagttcaagaccagcctggctaacattgtgaaaccctgtctccactacaaaaaaaaaaaaaaaaaaaaaggctgtgtgccaaggcaggcagatcatgaggtcaggagtttgagagcagcccggccaatatggtgaaaccctgtctctactaaaaatacaaaaattagctgggcgtggtagggcgctcctgtagtcccagctacttgggagggtgaggcagaagaattgcttgaatccaggaggtggaggttgcagtgagctgagatcatgccactgcactccagcctgggcgacagagtgagattctgtctcaaaaaaaaaaaaaaaaaaaagaaaagaaaaattagctgggggtggtggtacgtgcctgtagtcccagctactcaggaggctgaggcaggagaattgcttgaacccaggagatggaggttgcagtgagctgaaatcaccttactgcactacagcctgggtgacagagcgagactccgtctctaaagaaaaaaaaaaaggccgggtgcggtggctcacgcctgtaatcccagcactttgggaggctgaggcaggcagatcatgagaggcagatcatgagatcaggagttcgagaccagcctgaccaacatggtgaaaccccatctctactaaaaatacaaaaattagccaggcatggtggcacatgcctgtaatcccagctactcaagaggctgaggcaggagaatgtcttgaatccaggaggcagaggttgtagtgagccaagattgcatcactgcattccagcctgggtgacagagtggactccgtctcaaaaaaaaaaaaaaggccgggcgcggtggctcacgcctgtaatcccagcactttgggaggccgaggcgggtggatcatgaggtcaggagatcgagaccatcctggctaacaaggtgaaaccccgtctctactaaaaatacaaaaaattagccgggcgcggtggcgggcgcctgcagtcccagctactcgggaggctgaggcaggagaatggcgtgaacccgggaagcggagtttgcagtgagccgagattgcgccactgcagtccgcagtccggcctgggcgacagagcgagactccgtctcaaaaaaaaaaaaaaaaaaaaaaaaaaaaaaaaaaagaggtgggctgggtgtggtggctcatgcctgtaatcccagcactttgggaggccgaggcaggcagaatgaggtcaagagatcgagaccatcctggccaacacggtgaaaccctgtctgtactaaaaatacaaaaattagccgggcgtggtggtacacacctgtaatcccagctacacgggaggctgaggcaggagaattgcttgaatccaggaggtggaggttacagtgagccgagattgcagcactgcacgccagcctgacaacagagcaagactctgtctcaaaaaaaaaaaaaaaaaagtagtgaaaacaggaaggaaactgtttttttggtaacaacttatttgattataaattttatgtattatttattaatttgtattattattttttaatagagacggtttcattatgttgtccaggctgggctccagcaatcctcccaccttggcctcccagagtgttgggattctaggtgtaagccaccacacctggcctgactataagtttataaaacatatatatttatatatggagatatatttgtttatttatattttaatggctctttaaaaaacagttggtaaaattccccagaacttaacagtatgctcttgtgagccagtgtgaaccagcttcaggacaccactgtatccatccatccatgaatccattctgcccttttagtttctctcttctcttgtccccaccaccacaacccttagggaggcctcagcttgtggtctagcatccttctctgccttctctgtgctgacactagagagatctttcatgctcctgttccaaaggcatccctgctccccatgcttccaagagaaagtgaaacatcccagcattcaatacccttccctttctgccttctgctgatccttcccatctcatctcctacatcccctccatccatgacacctcaactcctgcgctctcgaacttcccatggtcggttatattgtccaccccagaatgccctcctcccaccatgttttcttttttttttgagacagagcctggctctgtcgcccaggctggagtgcagtggtgtgatctcggctcactgcaagctctacctcccaggttcacaccattctcctgcctcagccttctgagtagctgggactacaggcgcctgccaccacgcccggctaattttttatattttttttagtagagacggggtttcatcgtgttagccaggatggtctagatctcctgacctcgtgatccgcccgccttggcctcccaaagtgctgagattacaggcgtgagccaccgcgcctggccttttttttttttttttttttttgagatggagtcttgctctgttgccaggctggagtgcatggcgtgatctcaactcactgcaacctccccctcccgggttcaagcgattctcctgcctcagcctcccaagtagctgggattacaggtgcacgccactacgcctggctaatttttgtgtttttagtagagacggggtttcaccatgttggccaggctggtcttgaactcctggcctcaagtgatctgcccacctcagcttcccaaagtgctgggattacaggtgtgagccactgcacctggcctccacctccttctcttcctgctttcctccaaggcccaggtcaaatgccatcttctcaatgaaaacttcccagatcttccttttaggaatagctttcttcttcccccacaccagcataactctcctggtacctttgttatattatcaacacctcctgcctggtattagaagtagctgtatgcctgtctatctccttcctagactgtgaagttcttttcagcaaaattcagcaaacagctgctgacctactacctaccatgtgtcaagcagtgtgttaggccctggtggatgaaaagatactcagtaagaaccaaatcccagtcctcaagagctctcaatctcatagaagagataagaggtgaacataaacattatcccaatgttctatagtagttgagagaagaaagtgaccttcctggtgggtggggtggatcagagaagaattcatggaagaggtggcatttgattagggttacttggataattatcccatactgctcattgtcctctcttctgacccccttaaccacctgaaattgctgctggtgcatccttgacccaattctgatattcttgcttgatgttgcctgcttggtgttggttgtccatatgcctggcagggcgtgctgatgcccagctgtgtccatgccaggattccagaggagaaccagccacccagcaagcaggtgaagccactcttccgccacttccgccggatagactcctgtctgcagacccgggtggccttccggggctctgatgagagtgagtgtgggcattaggaggggcagggtgtcctgagtggctcagggggacatatctctgggtcttgagcaccctcagtggcatctccctgggtggtagaaccagcccctttcacaggaccttcttcagaggccagcctctggtggggaatagaggcaccctggaggagactgtgccagctgctgccactctgccctctgttgaaagccattttcctgtttccgtccagtcttctgccgtgtatacatgcctgaccactcttatgtgaccatacgcagccgcctttcagcatctgtgcaggacattctgggctctgtgacggagaaacttcaatattcagaggagcccgcggggcgtgaggattccctcatcctggtagctgtgtcctcctctggaggtgagggtcaggaagaactgggctgatgctccgagaggagaaactcacaagctcagggctctgggggaggggtagagactgaattctaggcccttgctactcaaagtatggtcccgggacaagcctcatgtgcatcgcctgggaacttgttaggatgcagcatcttgctgggtgcagtggtgcaaacctgcagtcccagctactcaggaggctgaggcaggaggattgcttgagcccaggaatccaaggtagtacattatgattgcacctgtgaataggcactgcgccctatcctgggcaacataacaagactctgtctctaaaagagatgcagcatctgcgaccccaccccgacctgctggtcttgttcaaatcagcatttggacaggaccccccaggggactcctatgcctactaaagtttgggaggcactagctgggcatggtggtgtgcacctgtaatcccagctacttgggaggctgaggcaggagaatcacttgaaccgcggaggcggaggttgcagtgccgagatcaagacactgtgctccagtctgggcaacaagagcgaaactccgtctcaaaaaaaaaaaaaaagtttgggaggcactggtctaggactcaggttctgatctgagtgctgcccctcactcacctatggattgtattctgatcctttaacctccctgtgtatgtaaggatgccacatttcacaggctaaagacacaggatgagtgggaaggcagaaagccagcaatgtcactgaagctttgttttcctctacagtaggaaaaaatttcagccttcccagtgtcacaaggacaacagagtaagagaaaagctgtgaaagaaagggagtagaaaaaaagttataaatgcaaaagaaataatcatttgacaaattccagataaatatggcataaactagtgataagatgagttccattagtctagaatgtgtcagtgtggggtgaggagtttttggataggacagtgtcagtgtgggatgtgtgagggtgcaggcggcaggggccgaggatgagcagctctttctcctgcagagaaggtccttctccagcccactgaggactgtgttttcaccgcactgggcatcaacagccacctgtttgcctgtactcgggacagctatgaggctctggtaagaacttcccaaggccttgactggaatggagggctgaggagggctgtgagcaatccctcaccctgccaccaggagcccagcccctatgcccctgcctgccaccaggtgcccctccccgaggagatccaggtctcccctggagacacagagatccaccgagtggagcctgaggacgttgccaaccacctaactgccttccactgggagctgttccgatgtgtgcatgaggtggggaccgaggctggtgctatgctggggggctggagggagaaatgtgccattgggagacggtgttcgcagcacaacgtcctggttccaaggctcacttgcagcaagcccttgggcaacgcatggccgtaacctttgttcccccatctgaaaaaaatcgcaaagagagagaccccagagcacagtggctcagggcccaagtgctgtttacacagaacctgacccaggatttctatttttaaaatattcactattaaagaaataaaataaggcagagacaataatgcctagcagatggttgtcttgaggatgtcagccgtgagcgaatgcctggcacctagtaagtgctcagtagctggtgaaatattattaatgctggttgttttctttttccgcatctttgccgcctcctgtcctttctatttttctattttccaccccttccgcccccgccctcctgcctttcgctcctcatcgccttgcactgccatcttcccacccactcccctcaccccctggcgccctggccgcccctccgctgccgtgggtgcagctggagttcgtggactacgtgttccacggggagcgcggccgccgggagacggccaacttggagctgctgctgcagcgctgcagcgaggtcacgcactgggtggccaccgaagtgctgctctgcgaggccccgggcaagcgcgcgcagctgctcaagaagttcatcaagatcgcggccctgtgagtgcggccgtcggcgggatggggggccggaggccggaggcccgcgccgccgcccgcccctgaccccgcctcccacccccgcagctgcaagcagaaccaggacctgctgtctttctacgccgtggtcatggggctggacaacgccgctgtcagccgccttcgactcacctgggaggtgatgagacccctcccgttcctacctgggaatctgggcatcccgggctccccgaagtgcgtcctcccgggacggccgccggcctggagggagtctttgcgccagttggagggaggcgccctcttctggcatacgcaaccccagggcgcacagcttggctaatggaccctgtctttgtgcaaattagtgaaaagcccggatcccgcctgagtcacggcaggcagcccttggccaggtcaggtcgcagacttggctgtgggagttgggctgattttcatccacactcagtgggggcatctttatacaaagcacctgcataagacagacctggccttccccagaataatgaattcctctgggctgtttcaagcctctagacttagccaaggcctgacttcatttccccacccaccagcttcccagccccctacaagccatgcaggcccttttgccctccaacagggagaattaatccgaggctcccatgtaacccaaggagctccactctgatatcccttctccttccttcaaactctgcagaagctgccagggaaattcaagaacttgtttcgcaaatttgagaacctgacggtgagtgggtttggctctttcttctgctcttggactgagagcccagaaaccctctgttcccataaacccccttcctcaagctttcctttcaaggtgtttagtgtatgggaccccccaccctccttaccatgctggagggtgaggttggaaggattgcgcccctgtttttcttgaaggaaagggggagtagtcaggtccctccccaccacaccattagaaagcccccagcacccctatctgatcaggaatgtatacaaggcagggggtgagggaggaagctgaggacatctttgggatgcattggccagtctgtcccttgatctctctcctgtggaatactaggacccctgcaggaaccacaaaagctaccgagaagtgatctccaaaatgaagccccctgtgattcccttcgtgcctctgatcctcaaaggtgagagagttactcccaagctgtgccgcttccacccatgcttcccttctcctatgccctgcttctgacttccagctccctctcgactcagccctgagtacccacctggagaggagccccccaccacagacggagtgggttctggggaagagcggggtcctcgggtgcagtggcccctttcgaactcctctcttatcctttcctcacattggattctctccacatcccctagacctgactttcctgcacgaagggagtaagacccttgtagatggtttggtgaacatcgagaagctggtgagtgagtggcactgcaaacccctagtcccacaagtggggggcttgcatcctctccctctctcatcacctcccaaaaatagcagccttcctccaagtgcccagcttgcctaacagactcttgactgtctccctggtggcatcactgtggcaacccacccacaggtggcagagctgacaggcagcttgggggcaacttcacctccccctcacatggcactctgttacacccactcctttggtccttcagagaccctccagaattggagactggagggagtaaagcagagtgggagaatggcggagggggagcataagagggggagcctctttctgtgcccctttcaaggctcattccttgtcatctcccagcattcagtggccgaaaaagtgaggacaatccgcaaataccggagccggcccctttgtgagtacccagggtactgagagcagtacagatagagctttgactgaacgggagggttcaggggagaactccctgtccagatgtgtatttccatacacttgctggttccccattctctccttgcctctgcagaggccttcctgcccaacatctgtctcagtccacagcctgatcttctgcccggtgtgtgtgtagaggaagaagggaagctgggaacctgactgcctctccctctttacccactaggcctggacatggaggcatcccccaatcacctgcagaccaaggcctatgtgcgccagtttcaggtcatcgacaaccagaacctcctcttcgagctctcctacaagctggaggcaaacagtcagtgagagtggaggctccagtcagacccgccagatccttgggcacctggcactcaagcactttgcacgatgtctcaaccaacatctgacatctttcccgtggagcaacttcctgctccacgggaaagaggtcgatggatttacccctggacccataagtctgttcatcctgctgaagtcccctccccattgctccttcaagccaaaactacactttgctggttcctgtcccctctgagaaaggggatagaaagctccttcctctatgtcctcccatcgagatctgttctggggatggagcttccaacttcctcttgcagcaggaaagaatgctgctcacccttctgtcttgcagagtgggattgtgggagggattggcagccttcttctccaccacctgtccagcttcttcctggtcagggctgggacccccaggaatattatgttgccgtgtgtgtgtgtgtgtgtgtgtgtgtgtgtgtgtgtgtgtgtgtgtgtgtgtgtgtgtcttcttttagggagcaggagtgcatctggtaattgagggtggatgttgtgtgtgctggggaggggtccttctgtttggtgctacccttgtctactctgcccctggatggtgcggggtgctttctccacccccacactccctgctcagctcctcgtgctgccctgcatgcccaggcttgtgagccaagctgctttttggggcagggagtagcagcaggtgggaggggttacccatcagcccttgcaagtcccccactcaggcctctggaaggtccagggatgggctctgatgagagggtaaaagatgctcagggaaacacaggcctcagctgcctagaggaccctccccctgccttgcagtgggctcgggtagagcagtatcaggagctagggttgtctgctgcccacactcctgctttttgggatatctaactgctaaggagggagttgacatcccccttctggctcatgtgtctgacaccaacaacatggtctctgtccctctctctttgactctccctttgtcctccccatagagctggggtggggtggatccctatacctggggcaggcagccccaaagtgggggagggggatggcagagactgtaaaggcgccactggactctggcaaggcctttattacctttactcccctccctctcccatcaccagcctcaaggcctgaggggtgcaggggctcctggcagctactgggtgaggtttcctggcacagactcacccttctttctggcaccacctctttcccttttgaagagacagcaacagccgtagcaaaagcagctgctgctcctgctatgagggtgtatatattttttacccaaagctctggaattgtacatttattttttaaaactcaaagagggaaagagccttgtatcatatgtgaacattgtatcataggtaatgttgtacagacccttttatacagtgatctgtcttgttcctgcagcaaaaatcctctatggacataggaggtgctgtgtcccatgccctcttgccctgacagtgtcccatgggcccccttctgctccctgccccctccctgctactgctgatgcactctcctctccctgcagcccctggcttcccagccttcctcctgaccccttccaacagccttggaactccagctgccaccaccctctgggtcggacactgggacccactggcccagtcttggctgctgcttacccctagccttgatgcctgcccagggacccccagccccctcccgttgccctgcagctttaacagagtgaaccatgtgtattgtacaggcgcggttgtcattgcagaaaccgctgggtggagaagaagccgataaagtctatgaatcaacctgcctgttgttctccattctgttttctttgaggctgtggaagtgctgagggaggggagaggggatggccgcccagtgctgtcaggagcagggctgttctggagtgactttgaaaatgtgggtggcggggtacagtggctcatgcttgtaatcccagcactttgggaggccgaggcgggcagatcacctgagggcgggagttcgagaccagcctggccaacatggtgaaaccctgtctctactaaaaatacaaaaattagccaggtgtggtggtgcatgcctgtaatcccagctacttgggaggctgagtcaggagagtagcttgaactcaggaggcggaggttgcaaggcgcagtggctctccagcctgggcaacagagcaagactctgccaaaaaagaaaatgtggatgagaggaaaagatgccaacctcacaagacatgtcacataatgcctggaactcagaagaggggatgggatgttttcgttcatacatgttccaggtggcataaatatgagatcacatttaattctaatgctaaggtagaagattgaggcacagcagtcccagaataattactagtgagggcactggtcccctaacccaggtctgtcccctgaagacagcatgtactgttcacacaaccaatatttaccagttctactaagttttgttttgttttgttttttttgagacggagtcttgctctgttgcccaggctggagtgcagtggcgtgatgtctgctcactgcaagctctgcctcccaggttcatgccattctcctgcctcagcctcccaagtagctgggactacaggtgcccaccaccatgccgggctaattttttttttaatatttttagtagagatgaggtttcactgtgttagccaggatggtctggatctcctgacctcgtgatctgcccacctcggcctcccaaagtgctgggattacaggcttgagccactgcgcctggcccaatcctactaagattatagggtgcagagagcctagcgttaggcttaaatgatagcctgagttccaggagacatcatacactcaaatagctatacctgggcccttgataatccccattcacatctgtttctgcctcagtcttctgcatctcagaaaaatgatcctctcatccacccaggttttctctctctgttgcccaagctggagtgcagtggcgtaatcttggctcactgcaacctctgcctcccaggttcaagtgatcctcctgcctcagcctcctgagtagctgggattataggcagaggccaccacacccggctaatttttgtatttttagtagagatggggtttcaccatgttggtcaggttggtctcaaactcctgacctcaagtgatccacccacctcagtcttccaaagtgctgggattacagctgtgagccactgcccagccacctacccaagttttcaaggcaaaaatacaggactcaccattggtgcctctttctcccacccttcattcatctcagccagtcccatcggctacaattccagagcattttctgagtgatccacttctgtatgactcccctatgaccatactagtccaaaccaccttcatagcttccctgcatgactactgcagcctcctacctggtctgtcagcttcctctctttgatccacccctacctgccaccagtttgatttccacatggcagccagggtgttctttcagaaacaccaatcacgctgggcatggtggctcaagcccataatcctagcacttcgggaggctgaggcaggaggatcgcttgagcccaggagttcaagaccagcttgggcaacatagtgagaccctgtctctacaaaaaataaaaaattaacgaggctgcagtgagctgcgatagcaccactgtactatagcctgagcaacagagtgagaccctgtttaaaaaaaaaaaaaaaaagaaaggagagcaagggaaggagggagggagggacagagggagggagagagggagggaggaaggaaagaaggaaggaaggaaggaaggaaaaaaacccagtgtctttcaacacatgaatggacaaatgcattggggcatattcttatggtggaatactatatagcaagaaaaaagaacaaattattaatacccacgtgaatgaatctcacagacttaatgttgaataaaggaagccagacacaggctgggtatgttggctcacacctctaatcccagcactttgggggcctgaagtaggagtgagaggtgaagctggctgggcttctgggtcaggtggggacttggagaagttttctgtctagctaaaggattgtaaatgcaccaatcagtgctctgtgtctagctaatcaggtaggggacttggagaacttttctgtctagctaaaggattgtaaaagcaccaatcagcgctgtgtgtctagctaaaggtttgtaaatgcaccaatcagtgctctgtgtctagctaaaggtttgtaaatgcagcaatcagtgctctgtgtctagctaaaggtttgtaaatgcaccaatcagcactctgtaaaaacgaaccaatcagcactctgtaaaacggactaatcagcattctgtaaaatggaccaatcagcgctctgtaaaatggaccaatcagcaggatgtgggtggggccaggccacccgagccagtagcggcaacccactggggtccccttccacgctgtgggagctttgttcttttgctctttgcaataaatcttgctgctgctcactcttttggtccgcactatatgagctgtagcacttaccacaaaggtctgcagcttcactcttgaagccagcgagactacgaacccactgggaggaacaaacaactccagaagcgccacctttaagagctgtaacactcactgctgaaggtctgtggcttcattcctgaagtcagggagaggacgaacccaccagaaggaagaaactggacacatctgaacacctgaaggaacaaactccggacacaccatctttaagagctaacactcaccgtgagggtctgtggcatcattcttgaagcttcattcttgaagtcagcaagactaagaacccactggaaggaaccagttctggacacaggaggatctcttaagcccaggagttcaagaccagcctggccaacatagtgagacccctatctctacaaaaaataaaaaatgtagctgggcatggtgtgtcgcgcctgtaatcccagcactttgggaggttgaggcaggagaatcccttgagtccaggagtttgagaccagctcaggcaacatagggagaccttgtctctacaaaaaaataaaaaaataggccaggtgcggtggctcatgcctgtaatcccagcatttgggaggccgaggtgggtggatcacctgaggtcggaagtttgagaccagctgaccagcatggagaaactgtctccactaaaaatacaaaattagctgggcgtggtggcacatgcctgtaatcccagctactcgggaggctgaggcaggagaatcgcttgaacctgggaggcagaggttgtggtgagctgagagcgtgccattgcactccagcctgggtaacaagagcaaaactccatctcaaaaaaaaaaaaaaggctgggcagggtggctcacgcctgtaatcccaacactttgggaggctgagacctatggatcacgaggtcaggagtgcaagaccagcctggccaagatggtgaaacaccatgtctactaaaaaatacaaaagtgagctgggcatggtggcaggcacctatgtaatcccagctactcagaaggctgaggcagataattgcttgaacccgggaggcagaggttgcagtgagccgagatcgtgctactgcactccagcctgggcgacagagtgagactccgtctcaaaaaaaaaaaaaaaaaaagccatatatggtggtgcattcctgtagtctcagctacttggtaagctggggtgggaggattgcttgagcctgggagctcaaggctgcagtgagcagagatcatgccactgtattccagcatgggcgaaagagggagaccgtgtctcaaaaaaagaaaaaaaaaaagccaagcatagtggtgcatgtgtgtagtcccagctactcaggaggctgaggtggaaggattgtttaagcccaggagttcaaggctgcagagagctatgattgcaccactgtactccagcctgggtgacagagtgagactctttctcttaaaaaaaaaaaagaaaaagaaaaaaaggccgggcacggtggctcacgcctgtaatcccagcactttgggaggccgaggcgggtggatcacgaggttaggagagtgagaccatcttggccaacatggtgaaatcctgtttctactaaaatacaaaaaaattagctgggtgtggtggcgtgcgcctgtaatcccagctacttgggaggctgaggcaggggaatcgcttgaacccgggagggagagtttggagtgagctgagattgcgccactgcactccagcccggcgacagcgacagaacaagactcagtctaaagaaaaaaaaggctgggcgcggtggctcacgcctgtaatcccagcactttgggaggcggaggcgggcggatcacgaggtcaggagatcgagaccatcctggctaccagggtgaaaccccgtctctactaaaaatacaaaaaagtagcccggcgtggtggtgggcgcctgtagtcccagctactccggaggctgaggcaggagaatggcgtgaaaccgggagggggaccttgcagtgagccgagatggtgccactgcactccagcctggacgacagagcgagactccatctcaaaaaaaaaaaaaaatttaggccgggcacggtggctcacacctgtaatcccagcactttgggaggccaacgcgagtggatcacctgagattgggagttcaaggccagcctgaccaagacggagaaaccctgtctctactaaaaacacaaaattaactgggtatggtggcgcatgcctgtaatcccagctactagggaggctgaggcaggagaatcgcttgaacctgggaggcggaggttgtggtgagctgggatggcaccactgcactccagcctgggcaacagagccagactccatctcaaaaaaaaaaaaaaaaagttcaagagcaggctaaattaatctacggggatagaagtaaaaataggctgggcacggtggctcatgcctgtaatcccagcactttgggaggctgaggcgggcgaatcacgaggacaggaaatcgagaccatcctggctaacacggtgaaaccccgtctctactaaaaacacaaaaaaaattagccgggtctggtggcgggcgcctgtagtcccagcaactcgggaggctgaagcaggagaatgacgtgaacccgggaggtggagcttgcagtgagccgagatcatgccactgcactccagcctgggcgacagaacaagactccgtctcaaaaaaaaaaaaaaaaaaagaagtaaaaatagtgcctactcaatagggtaggggaaagtattgaccgtgaaggggcatgaagaagccctgtggggcgatagaaatgttccatatcggccaggcgcggtggctctcgcctgtaatcccagaactctgggaggtcgaggtgcgggaggctgaggcaggagaatcacttgaacccgggaggtggaggttgcagtgagctgaggttgcactgagctgagatcgggccactgcactccagcctgggcaacagagtgaggaataaataaataaataaataaaagaaatgttccatatcgtgacctgggggtgggtatacaagtgtgtctatctggcttgttgagttggtcatgtaaaatttgttaagtgttaccgtagctacattacaccataaagcaattcagattctgacagtccactgtttttaataacagatttaaaataaaaaattctcccttcctggccaggcatggtggctcacacctataatcccaggactttgggaggctgaggcaggcagatcacttgaggtcaggagttcaagaccagcctagccaacatggtgaaagcctgcctctactaaaaatacaaaaattagttgggtgtggtggcggtcacctgtagtcccagatactcgggaggctgaggcaggagaatcagttgaacccaggaggcggaggttgcagtgagccgagatcccaacactgcactccagcctgggtgacagagcgagactctgtctcaaaaaataaataaataaggtgtcttcatgaggtgtgctgcgtgcagtgaagaatttaggcagtgccctttgaatccactaggtgtcaccaccaagattgttttctcaacctgcctggggatgagggaggaggctacataacccagaggaggatagtgcctttcttggggtaatcttgaatccttctgagagggtctatccccagatataagtcatatttgaccggaagaacttgtttcttcagtctctccctatgagctctttcatctttagcgtttaaacccttttaagtctccatttttaaaaacactttccttctgtagtcctagtgggaggatcgcttaagcctagaagtttgaggctgcagtgagctatgatcacaccactgcacgccagcctgggaaacagaccaagaacatgtctcaaaaataaataggccgtgtgcagtggctcacgcctgtaatcccagcactttgggaggctgaggcaggaggattgcttgagctcaggagtttgagaccagcctgggcaacatagtgagacccttacctctactaaaaaaaaaaaaaaaaaagccaggtgtagtggcatatgcctgtaatcccagctactcggaaggctgaggcatgagaattgcttgaacccaggaggtggaggttgcagtgtgtggagattgagccattgcactccagcctaggtgacaaagtgagactgtctaaaaaaaaaaaaaaagaatcctaatatttggggaaaaaaagaaaaaacattatgtttaaatgtgttgtgtaatatttcaatcatacaaaaagtttaaagactaatataatgagcacttgagtctccacctcccagcttaggaaatgaaaacttggccgggtgccgtggctcacttctgtaatcccagcactttgggaggccgaggtgggcagatcatgaggtcaggagatcgagaccatcctggctaatacagtgaaaccccgtctctactaaaaacacaaaaaaattagccaggtgtgtagtcccagctactcgggaggctgaggcaggagaatcacttgaacctgggaggcggaggttgcagcgagctaagctcgtgctactgtactccagcctgggcaacagagagagactccgtctgaaaaaaaaaaaaagaaaagaaaaaaagaaaaagaaatgaaaccctaccctccagctgaacctggtacctgtccccagttgcatcctctttctttctttccagagacaaccaccctcataagtatggtattgtgacacaaagtagcaaacctaagtagccacttttgttaattctgcttgccagcagaatttcaccaattcccttggcagcagaatttcacaaagcccctgagtcagtgtgagcacagtccccagcccagaagaatgccctgaaaatgataagcaggatagggcacagcttcctgtgtctcttgccaaagtcactgcaatttccgaaaagataagttcagtgatcctggcctttgcttcttcctgtacgtaaaacaatgtgacgaattaatgattatgcctctgtaatctataaccagatgtatcttcgcacccatactttgatgagattttgctctaatgtaacttctcagcatatatttaatataacttctgagcacatacagaaccgccaccacctgtgtattcactactccggagcagtctaactgaatctctctgaaagtctcctcccaggttgggcgcaatggctcatgcctgtaatcccaacactttgaaggctgaagcaggtggatcacctgagatcaggagtttgagaccagcctggccaacatggtgaaacgtcatctctattaaaaatacaaaaaaaaaaaaaatggccgggcgtggtggctcacgcctgtaatcccagcactttgggaggcctgaggcgggcggatcacaaggtcaagagattgagaccatcttggccaacatggtgaaactccatctctactaaaaatagaaaaattagcagggcgtggtggcgcatgcctgtaatcccagctactcgggaggctgaggcaggagaatcacttgaagcagggagtcggaggttgcagtgagctgagatcgtgccactgcactccagcctggcagcagaacgagactccgtctcaaaaagaaaaaaaaaatagctgggcgtggtgatgggagcctgtaatcccagctacttgggaggctgaggcaggagaatcgctttaacctgggaggcggaggttgcagtgagccaaggtcatgccattgcactccagcctgggcaacaagagcgagactctgtctcaaaaaaaaaagaaagaaagaaagaaagtctcctcccagattgcaatcctcagtgaaactctgcataaaacttattctttaaatgcttggtttttctctctctctctctctctgtctctttccttcttcttcttctttttttttttttggggggggttcaggatgttactctgtcacccaggctagagtgcagtggtgcaatcacagctcactgcaaccttgacctcctggactcaagtgatcctcccacctcagcctcacgagtagctgggaccacaggcatgcaccaccatactcggctagtttttttattgtttgtagagacagaattttgctacgttgcccaggctggtctcaaactcctgggctcaagggatcttcccatctcagagtctcaaagtgctggggttacaggtgtgagccactgttcccagccaaaagcttgatttttctttcatcaacagtataacattcctgtaaacttgtactacatttgtatacatctccaaacagtgtgttgcaattttgaggataacagttttattgagatgtagttcacatactatgtaattaacctaaaatgtacaaatcaatggtttttagtatattcaccaagctgtgtaaccatcaccacagttaattttgttttttttgttttttccgagacagagcctcgctctgttgctcaggctggagtgaaatggcacggtctcggctcactgcaacctccacctcccaggttcaagcaattctcctgcctcagcctcccgagtagctgggattacaggcggccgccaccatgcctggctaatttttgtatttttagtagagatgggggtttcaccatgttggccaggctggtctcgaactgctgacctcgtgatccacctgccttggcctcccaaagtgctgggattacaggcgtgagccaccgcacctggctaattttagatcattttcattaccccccaaaagaaaccccctgtacaagactgttcatagcaacattatttgtagtagcccaaagtagataaactaaaatgtggtatattcataagatggaatactattccatcataaaaaagaatgtatttgtccattctcacactcctataaagaactacctgaggccaggtgcggtggctcacacctgtaatcccagcactttgggaggccgaggcaggtggatcacctgaggtcaggagttcaagaccagcctgaccaacatggtgaaaccccgtctctactaaaaatacaaaaaaattagctgggcgtggtggcaggtgcctctaatcccagctacttgggaggctgagggaggagaatcgtttcaacccaggaggcagaggttgcagtgagccagattgtgacactgcacaccagcctgggcaacaagagcaaaactccatcacacacatacacacacacacaaaaactacctgagactgggtaatttataaagaaaagaggtttagtggctgggtgcggtggctcacgcctgtaatcccaacactttgggaggccaaggtgggcagatcacgaggtcaggagattgagaccatcctggctaacatggtgaaaccccgtctctactaaaaatacaaaaaaattagctgggcatggtggtgggcgcctgtagtactagctactcgggaggctgaggcaggagaatggtatgaacccgggaggtggagcttgcagtgagccaagattgcgccactgcactccagcttgggcaacagagccaggctccgtctcaaaaaaaaaaaaaaaaaaaaaagaaagaaagaaagaaagaaaagaggtttaggccaggcacggtggttcattcctgtaatcgctacactttgggatgccaaggctagcagatcacgaggtcaggcaatcaagaccatcctggccaacatgatgaaacccagtctctactaaaaatacaaaaaattagctgggtgtggtggcacgcacctgtagtcccacctactcaggaggctgaggcaggagaatcacttgaacccaggaggcgagggttgcagtgagccgagatcatgccattgcactgcagcctggacaacagagcgagactccatctaaaaaaaaataagaggtttaattgactcacagttccacaggacgtacatgaggcacggctggggaggcctcaggaaacttacaattatggcagaaagggaaaggggaagcaagtaatcttcacatgagcaggaaagagagagcagaaggggaggtgacacacacttttatttatttatttatttatttattttgagactcactctgtcgcccaggctggagtacagtgacatgatctcagctcactgcaatctctgccttccgggttcaagcgattctcctgcctcagcctcctgagtagctgggattacaggcatgcatcaccatgcctggctaatttttgtatttttggtagagaaaagatttcaccatgttggccaggttggtcttgaacccctgacctcaggtgatccacccgcgttggcctcccaaatgctgggattacaggcgtgagccatgtgcctggccagtgccacacacttttaaacaaccagatctcatgagaactcattcattatcacggaatcagcaagggggaaatctgctcccatgatccagtcacctcctgccaggtccctcctaacattggaaattacaatttgacatgagatttgggtggggacacaaagtcaaaccatagcaaggaatgaagtactgatatatactacaacatggatgaaccttgaaaaaactgtgctaaaaaaccagacacaaaaggcctcatattgtatgattccatttatatgaaatgtccagcatagacaaatccatagagacagaaagtagatagtttctggttgccatgggctggggtgagagcagaatggggagaggctactaatgggtatggagtttctttttgggtgatgaaaatgttttggaattagatagtggtgatggctgtacaacattgtaaatatactatatactcacttggatgctttaaagtggttacaatggtgagttttatgttatgtgaattttatttgcttggcttctagactcatcacaccagtctctgcctccatcattacaaggcattctcctctgtgtgtctctctgtgtcctctcttcttctttctttcttttttttttgagatggagtctcactcttgtcacccaggctggagtgcagtggcatgatcttggctcactgccacctccgcttcccaggttcaagtgattatactgcctcagcctcctgaatagctgggattacagaggcccgccacgacgcccggctaattttttgtatttttagtagagatggggtttcactgtggtctcgatctcctgacctcgtgatccgcccgcctcggcctcccaaactgctgggactacaggcgtgagccactgcgcccagcctctcttttcttttctttcttttttttttttttttgagacagagtcttcctgtgtcacccaggctggagtgcggtgtcacgatctcagctcactgcagcctctgcctctgcatcctggactcaagtgatcctcccacctcaacttactgagtagctgggaccacaggcgcgcaccaccaagcacagctaatttttctggatttttagtagagacggggtttttatcgtgttgcccaggctcgtctcaaactcttggcctcaagctatctgcctgcctcggtcggccacacaaagtgctggaattacaggtgtgagccaccacgcttggccaattgaatgtttttagattttatataaatattatcatactggatgtggtgttcagcaactccccatccacaacactctgcctgtgaggctcatccaggtcagcatatattactggtttgtttggttttgctgttctgtgtttctctttgattctcaacccagtgcatctggctttctctgtcatcactcacataatctgcctgggtcaagagcaccgatgactcccatgttaccaaatccaagaacacttattttcctattgctggcatttgatatttctgaccattcttccttctggaacacttatcgctgcttccaggatgctacgttctcaggatttccctgtcttctctttctcagtcttcctcactggcctctccctcagcctggtccttgtatgtggagtgccccagctccctcttgagccctttttttttccttccataatcctgggcttagatttcatcgtcatatttgtgtttgggaatctactgctgcataacaaacagttccaaatttagtagcttaaaaatgacaactttgttttattttattttactttttatttttttttgagacagagtcttgctctgtcgcccaggctggagtgcggtggcatgatcttggctcactgcaacctccgcctcctgggttcaagtgattcttgtgcctcagtctcccaaatagttgggattacaggcatgagccaccacgcccagctaatttttgtatttttagtagagacagggtttcactatgttgcccaggctggttttgaactcctgacctcaggtgatctacctgcctcagcgtcccaaagtgctaggattacaggtgtgagccactgcacccagcctaaaaacagcaaccattttataacttctcatgatcttccgggctgatgggagcttagctggatagttcttctggtctcacttgaggtctctcttgctgcagtcagaaggccactggagggccaggtgcagtggcttacgcctgtaatcccagcactttgggaggccgaggcgggcggatcacctgaggtcaggagtttgagaccagcctggccagtgtggcaaaaccccatctctactaagcatacaaaaattagtcgggcatggtggctggtgcctgtaatcccagcttctcaggaggctgaggcagaagaatcgcttgaactcgggaggcggagatggcagtgggccgagatcgtgccactgcactccagcctgacaaagcgagactcagtctcaaaaaaaaaaaaaaaaaaaaaaaaaaaagccactggagctagctaggatgctagctcacatgtcctgagccctggtgggaacaaagggaccacaaggatggctggacttttctctccatgtccaggcttctccctccaggtggtctctgcagcagagtacctgatttctcacatgggagatgactcccaaaagcaaaaaagtagaagctgtcaagtctttttacaatttagtcctgaacctggtacagcttcaattctgctgcattccactggttaagagcagtcacaggccagccccacattcaataaataccaggactcctggttcactgggagccatctttggaaattagctaccacagtttatgagtcccaaattcctaggattactctcctcagtttcagacccaaatatccagtgatctaaggaatctctcttcttggtcattccactgtgctattcgggctcctccagtgccccagcccctcctcttgctctgcaactgtttccagctaagtgttaacatcacctccaagcaggagttcaagtcagaaatttagcaatcatatttgggtcctcccactctttggtcccgcattccttttcttaaatatctctagacttacccctctccatctctgctgctgatactctaatcacaaacatggctaagattggtgagtggtttccatgtgtgtaaacacttgggatgcattccatttgggcttatctgctcattttgcagatgaggaacctgagactggtagaggttggataatttgcccaaagtctcaccttattcaagagtggggagaactaagaggccttaggttctgcagacagacaggcagccctgacttcagaggctttgtgccaagccagtgtccagcagccactcagtgtagacaactgtcatctcccagttggcctttcctagcagtctcccaactggtgttccggcctccaacctggccccatctaatccatcctccttgctgcagtcagaggtatctttctagaataccaagagcatcttggtcttctctgcttaagcctttcaatggtttcccttgagataaaatctaacttttctcaatacataattaagtccttcataaattggcccctgtcagcttgacagtatagcgtgaggcagtagctcttcatgggagcattttggaaatgtcgttgtccatctatcacaatggtaagaacgtgctattggcatttgatggtcagtggtcagggatactggagtgctataatacaagggacacccaaccaagaattatccttggtttccacaaaactctttttttttttttccagagtcttgctctgtcaccccagcttgagtgcagtgacacaattttggctcactgcaagctctgcctcacaggttcaagctattctcctgcctcggcctcccaagtagctggacttataggtgctcgccaccacgtctggctaattttttttttttaatatatatatagtttctgagacagaggctcgctcttgttgtccaggctggagtgcagtggcacaatcttggctcaccccaacctctgcctcctgggttcaagccattcttatgcctcagcctccagagtagctgtgattacaggcacctgccatcatgcccggttaatttttgtatttttagtagagatggggttttaccacattggccaggctggtctggaactcctggtcacgagtgagccacccacctcagcctcccaaagtgctgggattacaggcgtgagtgggtcccatctttacggtgggggaatctcctattaaattcccctttgaagactgagcacggtggctcatgcctgtaatcccaacactttgggaggctgaggcgggaagatcatgaagtgaagagattgagacaatcctggccaacatggtgaaaccccgtctctactaaaaatacaaaaaattagctgggcgtgctggcacgcgcctgtagtcccagcaacttgggaggctgaggcaggagaattgcttgaacccaggaggcagagcttgcagtgagccgagactgcacctctgtactccagcctggtgatagagcaagactccatctcaaaaaaaaaaaaaaaattcccctctggagaggttttggggtgtttccccttcccatgagacaataacaaaagttcaagttcaccaggttagtcaagtgccctcagagtaaaagcttgtttcagtgttccactgacctctctctgcatcccctgccttattttattttgccctgaaaattccttactttttcagcagctcatcaaagcatttaaaatttaaaaaaatttaggctgggtgtggtggctcatgcctgtaatcccagctactcgggaggctgaggcaggagaatcgcttgaacccaggaggcagaggttgtggtgagccaagatcacgccattacattccagcttgggcaacacaatgagactccatttcaaaaaaaaaaaaaaattaggccaggcgcggtggctcatgcttgtaatcccagcactttgggaggccaaggtggcagatcatgaagtcaggagattgagaccatcctagctaacatggtgaaaccctatctctactaaaaatacaaaaaattagccaggcgtggtggcgcatacctgtaatcccagctactcgggaggctaaggcaagagaatcgcttgaacccaggaggcggaggttgcagtgagctgagattctgccactgcactctagcctgggcgagagcgtgaaattccgtctaaaaaaaaatttaaaaaaataataatttttatctgagatttttagttgttttttggggagacagagtcttccaggtacttggcctggcagacaaaggaaggcataaacatgaaatatttttgcacgtatttaatatgacctgtttttttccaagaatgcaactactatgtaaattgttttgtattgttcagaactttatcaaaagttgtttaccattttggaaaatcacaaccctaatggcaatgctgttctatacaacacccttaggtcagtctgcatttatctctaccacactcttagtgattctaggtatgggtgcaagtatctgactactttatcttctagtgtaatggtgcctgggtatttgcatattgaaacgccatccttctatttgtcttttttttttttttgagacggagtttcactctcattgcccaggctggagtgcaatggcatgctcttagctcactgcaacctctgcttcccgggttcaagcaattctcctgcctcagcctcctgagtagctgcgattaaaggtgcccaccatcatgcctggctaattctttatatttttagtagagatgagatttccccatgttggccaggctggtcttgaactcctaacctcaggtaatccacccgccttggcctaccaaagtgctgggattgcaagtgtgagccaccgtgcccggcctatttgtcttttttataatcaagacatcatattgatttgttttttgaaatcatgtgtccaggcaggttatattatctgttcatttcactttgggatattagtgttgcaaaatatttgttataagaaaggaacattgggactgggtgtagtggcttacacatgtaatcccagcactctaggaggctaaggcaggaggatcactggaacctaggcgttccagatcagcctgggtaacacagtgagaccttgtctctactaaaaacaaaaaaaaaattagctgggcatggtggtgtgggcctgtagtcacagctatttggaaagctgtggcaggattgcttgaaccttggagttccaagttacagccacctatgattgtgctactgcattccagcctgggtgacggagcaagaccctgtgacattggatatggtagggtggaaagtcaccagccaggacattaagaacgcagactcagccaggcatggtgactcatgcctgtaatcccagccctttgggaggctgaggcaggcagatcacgaggtcaggagttcgagaccagcctggctaacagtgaaaccctgtctctaagaaaaatgcaaaaattagccaggtgtggtggcatgcgcctgtagtcccagctactcgggaggctgaggcaggagaatcgcttgaacctgggaggtgaaggttgaagtgagccgaggtcgcaccattgcactcaagcctgggtgacagaatgagactccatctaaaaaaaaaacacacaaaggccgggcgcggtggctcatgcctgtaatcccagcactttgggaggccgaggtgggtggatcatgaggtcaggagatcgagaccatcctggctaacacagtgaaaccctgtctctactaaaaatacaaaaaattagccgggcgtggtggtgggtgcctgttgtcccagctactcaggaggctgaggcaggagaatggcgtgaacccgggaggtggagcttgcagtgagccgagatcgtgccactgcactccagcctgggcgacagagtgagactccgtctcaaaaaaacaaaaaacaaaaaacaaaaaaaaaccacacacacaggctcagcggggtgcggtggctcacgcctgtaatcccagcactttgggagtccgaggagggtggatcacaaggtcaggagttccagaccagcctggccaacatagtgaaaccccttctctactaaaaaatacaaaaattagccaggtgtggtggagcacgcctgtaattccaggtactcaggaggctgatgcaggagaattgcttgaacccaggaggtggagtttgcagtgagctgaaatcatgccactgctctccagcctgggcgacagggcaagatgtgtctcgaaaaaaaaaaaaggggttgggcgcagtagcacattcctctaattccagcactttgggaggccaaggctggcggatcacctgaggtcaggagttcaagaccagcctgaccaacatggataaaccccgtctctactaaaaatacaaaattagctgggcatggtggcacatgcctgtaatcccagctactagggaggctgaggcagcagaatagtttgaacccaggaggtggaggttgcggtgagccgagatctcgccattgcactctagcctgggcaacaagagtgaaactctgtctcaaaaaaaaaaaaaaaaaatgccgggcgcagtggctcacgcctgtaatcccagcactttgggaggccgaggcgggcggatcacgaggtcaggagattgagaccatcctggctaacatggtgaaaccccgtctctaccaaaaatacaaaaaaaaaaaattagccaggtgtggtggtgggctcctgtagtcccagctactcaggaggctgaggcaggagaatggtgtgagcctgggaggtggaacttgcagtgagccgagatctcgccactgcactccagcctgggcgagagagcgagactccatctcaaaacaaacaaacaaacaaacaaaaaaacaaagggccaggtgtggtggcttacacctgtaatcccagcactttgggaggccaaggcaggtggatcacttgaggtcaggaattcaagaccagcctggcaaatatgatgaaacctcatttctactaaaaatacaaaaactagccgggcgtgctggcatgtgcctgcaatcccagctactcgggaggctgaagcagaagaattgcttgaacccgggaggcagaggttgcagtgagccgagatcgcgccattgcacttcagcctgggcaacacagcaagactgtctgaaacaaacaaacaaaaaacacagactctggagatacttttactttcgctacttatagatatgtgactttgagcaagatgattaaccttgctgtgtctgtttcttcatctgtaaaatgggcttaaaaatatctgcctcagaaagttattgagaggattaaatgagctatgtgaggttttgacagtgcctggcacatggtaagtgttactaaatgtcaaacttatgatgacttctgtaacctaatttcttgcctcccccagaagttctaactctatatcaatatattttctgaaccaggtgaggtggctcacacctgtaatcccagcactttgggaggccgaagtaggaggatcacttgaggccaggagttccacaccacctgggcaacaaagggagatgctgtgtctgtgaaaagaaaaaaattggccgggcaccgtggctcacgcctgtaattctagcactttgggaggcctaggcaggtggatcacgaggtcaggagatcgagaccatcctggctaacacggtgaaacctcatctctactgaaaatacaaaaaattagctgggcgtggtggcgggcgcttgtagtcccagctacttgggaggctgaggcaggagaatggcatgaaccctggaggcggagcttgcagtgagccgagattgcaccactgcactccagcctgggggacagagcgagattccttctcaaaaaaaaaagaaagaaagaaaaagaaaaaaaatgtaaaaattagctgcatgtggtcaccagtgcctgcagtcccaaataggaggctgaggcagaaggaccacttgagcccagaagttcaagactacaggccaggtgtggtggctcacgcccataatcccagcactttgggagaccaaggtggatggattatctgagatcaggagtttgagaccagcctggccaacttggtgaaaccccatctctactaaaaacacaaaaattagggccaggcgcagtggctcacaactctaatcccagcactttggaaggccaaggcaggtggatcacctgaggtctggagtttgagaccaaccttgcctacatggtgaaaccccatctctactaaaaatacaaaaaattagccgggcgtgttggcaggcgcctgtaatcccagctactcgggaggctgaggcaggagaatcgcttgaacccgggaggcgagctgagattgcgccattgcactccagcctgggcaacaagagagaaactctgtctcaaaaaaaaaaaaatacaaaaattagacaggcatggtggctggtgcctgtagtcccagctactcgggaggctgaggcaggagaatcgcttgaagccaggagatggaggttgcattgagctgagatcacaccactgcactccagcctgagcaatagagtgagactcattttcaaaaaatagaaaaaataaaaagactgcaggccaggcgcagtggctcatacctgtaatcccagcacttcaggaggccgaggcgggcggatcatgaggtcaggagatcgagcccatcctgggtaacatggtgaaacctcgtctttactaaaactacaaaaaaaaaaaaaaaattagccaggcatggtggcaggtgcctgtagtcccagctactcgggaggctgaggcaggagaatggtgtgaacccaggaggcggagcttgcagtgagccgagattgcgccactgcactctagcctgtgcgtcagagcgagactctgtctccaaaaaaaaaaaaaaaaaagactgcagtgagccattactgtgccactgcactgcagcatgtctttaaaagaccctgtctcttaaaaaaaaaaaaaagtgcgttcagttattggaatgtgccatgattcttcttgctttgcccaaactctccctacaatgcttttccttcacttcttccctggtcaattcctacctgtccctcaagtctcacttagaatatgggtatggcctcacttagttactttcttttttcttcctttagacagggtttcactctattgctcgggctggagtgcagtggccaatcatggctcagcccagccttgatctcctgggcttaagtgatcctcccatatcagcctcccaagtagctggaaccacaggctcacaccaccgtgtccagctaatttttttttttttttttgagacagagtctcactctcgttgcccaggctagagtgcaatggagtgatctcagctcaccgctacctccgcctcctgggttcaagcgattctcctgcctcagcatcccaagtagctgggattacaggcatgtgccaacacacctggctaattttgtatttgtagtagagacggggtttcaccatgttggtcaggttggtctcgaactccccacctcaggtgatctgcccgccttggcctcccaaagtgctgggattacgggcgtgagccaccgtgcccggttatatccgggtaatttttgtagtaacaagatttcaccatgtttcccaggctggtcttgaacttctgggctcaagcgatcccccctgtcagcctcccaaagtgctgggattacaggcatgagccactgcacttgggccatttacctttttcatgaagcctatatcactatttccccaagtctgggtgagatgtccctatattcatcccagcggctgcccttatcacagagtgtgtgatagagcatggggctttacattagctacagtgggcagtgaatgccctctgaggacgaagcatttgcagtaaggcttgaaaaatgaggaagaggcggaggatagccagtacacagtccctgaggtgggaactgctgaatggggtacattgcagtgatagaaatcaggtcctcataatgtagagtgagtgaggaggggacaggcaggggatgaggttgaagagttgggaggctctggtaaggtgtttggacccaccatctccctggctccatcgccccacgtatggccatgcaggatgtagacagctgaaaatctttacctcgtgtccttgatccctatgcctgctgtgttccctgccttctctgattaataataaaattccattcatccttcaaggcccagctccaaaccatttaggaaacctccttccattctttagcaggaattaattgctcccttgtctgacgtcccacagcactaatcacacgctgacttgtatctcagctagctgtttatgccagtctgcccaccaacgtagtgagttccctgagggcagaggctctgtcttagtcacctctgtagccatctcctggtgtttagcaggtactcaatgtgacatttacttgactagtgggtggtgcctagtactactcatggcagaatagaaggaaaacaaaaataataacaacttatgctctatcacgttttcccattcattaactgatttcagctttgcaacaactctatgagacagacgggacaggcactattagacccattttacagatagggtagctaaggcccaatggcacacagcttgtaagtaatggggactaagtcccaatcttgcccccttacttcggattctgtgctgggaatggaattaaaccaagagtattttgaagctataatggaaagcgcttttctgggtggactagggagagatacttagtcagctgtcagggtttaacagcagctccatcaaagagggcacaggatttctctctctggcccaagcagctggaggggtccacagcaccatcctatagccctggaagctggaggaaaccccagcccgagaaagaagagacggtgttcgagtcaggtgggtaagatgacgtaaatgatgacttgtgagcagtggcctgcctctgttgccatgacaaccggagcttgactacttggcctttgcaaggttggccgaggcgggttcttcgttaactcgagattaaggaaggatatttaggggggagggtgtgtgtgtgtgcggcggattaaagacgaaaggagtatattcaacaatgactgtttagctcagtggttctccaccttggcaacacgttagaatcacctgcaacaatttcctgatgcctaggctgcaccccagaattaaattataatttccaggggtgggaaccaggcatcatagtatttaaatcttgccaggtgattccaattgcagctaaagttgcaaacccagcttttagctggtaagcggaattcctgtgaccttcctaagatggcgtccactcaaccgcttccgcctttacgtgggccggcagggggcgggcttcccaggggcgcatgcgtctcgcatctctccgctccctgctctctcctcctttttcccccgcctccattttgttcgcggacgctggggacggtgggagcagatccatttccgggttggcaaaaggggcggtggcggcggcggcggcggcggcggcggcggcgacggcgagaaagagcttgccggggggcgagcaggacaggacgaagccggagtgtaggcggcagaggattcgctcccagagcagctgcggccaggtcggaaagaggccggggcggctgggtcagtcgctgaaatgacctgcggacctgagtgggagggaaagtcgcggggaggggggctcggggcggggcttgagaagagaggggggcattagaggaggggccggagggggagaggggtcttgcgggtggggcctgaggggcggggggccgggggactgtatcggaagaacctggaggagagagggcgtggggaatctggggaggagtggtcgaatattggtatggggcgagcggggactggaaaaatggggaggaacgtttttgagagacaggcaataagggctcctgaagggttgggtgagttaaggcggcaactctgtgaggaacgaggtaatcgtgcgcaaaaagggagacgggaacggaggacctgttgggaacggctaattagcaggatgctgtgggtgaggagtccagtgtgacattttggggattgagttaggtgaaagctagtgtttgggaagatggctcgggaaactgcttacactagagggaatcttgagagcgttctttgaaaaggaatcagaatttagttaaaggttggattgagaatgttaagatgcgcattggaacgtctggagttgagggttcatgttgaagtggtgtgaagtgagggaagatggaatttttttttttttgttttaaaggtggggtctggctatgttgctcagactagtcttgaactcctgggctcaagcgatcttcccaccttggactcccagagtgctgggattacaggtgtgagccactgcacccggccaagatggaaatgttaaagtgttcagcatggcagtgtgtatggtcgagttttttatcaggaaggaaagttcttaaaaatagcattgaggcaaggaactgatatgtgatggaattcttttttctttttttttcttttaagagacgtggtctcactctgtcgcccgggctggagtgcagtggcatgatcatggctccttaaagcctcgacctcccgggctgaagtggtccttccacctaagccccgccaatagctgggaccacaggtgtgaccactactcccgcctaacgtgtgtgtgtgtatatatatatatatatatatatatatatatatatatatatatatgtatatatatatatttttttgttgttgttgttggagacagagtcttgccctgttgtccaggctagtctggaattcctgggctcaagtgatcctcctgtctcggcctccgcaagtgctgggattacagggatgagccactgtgcctggcccagaattcgttttttttttttttttgagatggagtctcgctcagtggcctaggctggagtgtagcggtgcgatctcggctcactgcaagctccgcctcccgggttcacgcccattcttctgcctcagcctcccgagtagctgggactataggtgcccaccaccacacctggctaatttttttttgaatttttagtagagacggggtttcactgtgttagccaggatggatggtctggatctcctgacctcgtgatccgcccgcctctgcctcccagagttctgggattagaggcgtgagcccctgcgcctgtccagaattcatattttttaaaggacttgaataatctgttattgctttgggctctcccagggtccccgtcctttttcatgctgttatttttgccttacggttttggtttttgactgtcttactgaatgtttttggctattctgttctccttttacaaatcagaagagaaccacagggaataaggacagttttagcctacctatggatttagtaaataacttcaaggcaaattattaagctctcatttttttcccctttgaaatataggttttctctgtccctgcctctaaaagtttgtcttaacacatgggatctttaaagtggttgcatagaagtgatctctgaaaatgagattgagatattgatatttaaaagacatacaatggtgcacctgcctgtaatcccagctacttgggaggctgaggcaggaggattgcttgagtctaagagttcgagaccattctgggcaacgtagcaataccccatctctctctctgtctctttttttgtttgtttgtttaagacggagtctcgctctttcacccaggctggagtgcagtggcgtgatctcggctcactgcaacctctgcctgccggattcaagcgcttctcctgcctcagtcccccaagtaactggtactataggcatgcaccaccacgcccagctaattttttgtattttagtagagatggggtttcaccatgttggtcaggctggtctcgaactcctgacttcaggtgatccacccacctcggcctcccaaagtgttgagattacaggcatgagctaccacacctggccgcatgtttagttttttaactcttattaatgtcaacttttaaaagtaaaaatttcatattgtgttacattggttgccatcaagatgaagatagggaagttaagagttggggaaggtggagatgaatgaagtcaattgatgaagactagtagaatgtagtgttggtttttttatttgtttatttatttattttgagacagagtcttgctgtattgcccaggctggagtgcaatggcacaatcttggctcactgcaacctctgtctcctgggttcaagcaattctcctggctcagcctcccaagtagctgggattacaggcgcgtgctgccacgcccagctaatttttgtatttttagtagagacagggtttcaccgtattggccaggctggtctcgaactcctgacctcgtgatctgcccaccttggcctcccaaagtgctgggattacaggtgtgagccaccgcgcctggccgacctgtctcttaaaggaaaacaaggctgggcgcgctggctcatgcctataatcccaacgctttgggaggccaaggtggtggatcacctgagattgcagtgagctgagatcgcgccattgcactccagcctgggcaacaagagcgaaactccacctcaacaacaacaacaacaacaacaaaaggaaacatgtttttctgtttcttcctcttagccttgctcatgtgtgtgtgtgtttgtgtgtgtgtgtgtgtgtctgcgtgccagccagggaagaactggttttgatttgatgcatattcagtttttttttttttttttttttttttttttttttgagacagagtttcgctcctgctgcccaggctggagtggaatggcgcagtcttggctcactgcaacctccgcctgccggattcaagcgcttctcctgcctcagtcccccaagtaactggtactataggcatgcaccaccacgcccagctaattttttgtattttagtagagatggggtttcaccatgttggtcaggctggtctcgaactcctgacttcaggtgatccacccacctcggcctcccaaagtgttgagattacaggcatgagctaccacacctggccgcatgtttagttttttaactcttattaatgtcaacttttaaaagtaaaaatttcatattgtgttacattggttgccatcaagatgaagatagggaagttaagagttggggaaggtggagatgaatgaagtcaattgatgaagactagtagaatgtagtgtttgtttttttatttgtttatttatttattttgagacagagtcttgctgtattgcccaggctggagtgcaatggcacaatcttggctcactgcaacctctgtctcctgggttcaagcaattctcctggctcagcctcccaagtagctgggattacaggcatgtgccacctggctaatttttgtatttttagtagagacagggttttgccatgttggccaggctggtcatttactaattccacctcacacttgatactagagtagtgtttaccctagctggtactgataagttatgtgatagcaccaaggtgaaatgcaggagaggtgtgaacattggagttttcaggttttactgatggcttttacgaagggaagagattctagactcactaggtgtttttaggaaaaaaaaaaggcaagaggcaagagacagaagtcttgttctgttgaagagaaaatttttttttgggttttttttttttttttttgagacggagtctcgctcagttgcccaggctggagtgcaatggcatgatctctgctcactgcaacctccacctcccaggttcaagcgattctcctgcctcagcctcctgagtagctgggtgccatcacgcctggctaatttttgtatttttgtagagacgaggtttcactgtgttggtcaggctggtctcgaacttctgaccttgtgatctgccagtctcggcctcccaaagtgctgggattacaggcgtgagccaccgcgcccggcccgagaaaattattaaatgttctttctttacttgtgttctctgattgggagagtaacctggtatatgttagtctgttttcctgctctgaaataactgtgaaattcatgggctcttggttcaggcagcttcagcaaacatagtcttcttacaaccccaggaagagttgcaggctacaaaatatatgtacttatttgggagtaaaaacctgcttaatattatgctattgcaacctacagtgtacctttttggtttgttttttaaggggattttgagataacatatggaggctcggtgctcctgggcggacttttggtacagcctgcttattttttttttcttttcttttcttttttttttttttttttgagacggagtctcactttgtcccccaggctggagtgcagtggcgcaatctcggctcactgcaagctccgcctcccaggttcacgccattctcctgcctcagcctcctgaggagctggactacaggcgcctgccaccacgcccggctgattttttgtattttttttttttttttttttgtagtagagacggggtttcaacttgttagcgaggatgtcttgatctcctgaccttgtgatccacccgcctcggcctcccaaagtgctgaaattacgggcgtgagccaccgcgcccggcccagcctgcttctttaacataatgattttccatttttcctatcctgtcacagttttccgttgctctgcttgagccagtcctatgtagaaagtggcaaattacacattttttctccccttttagtctctggtggacatcttgtctgtgtcacagtttgatactaccaaattgaaaggattcttcactgcttcagatggggagggtgacagaagctgagctgtttcctgggtcagataatggcctctgtcaaagcaaagaatagttgtagagacacaaactgggcccttgaagctgtgactaacattttggcaacatgcatccctttgccaaataacttcttttcttcttgagtgtgattgttgatctccttctcaaagtaggctcttgttgctactattcttcacacaactcccaagcaaaagttggcagagttccggttgactgactgtgtcttgagggatatgccccggattagagtggatggggcgttccatgtcaaaatgaggttcattggcagatcctgagagctgctttgcaaagaaatagaggcagtactctttactgaatgttcttgcggtcctttatctttcttctaaattcaagtctgtttcttattcatctagtgattaaatgcagaatcattgcctttgcctagcttcgtgggcattgtggaagagaagacagtatttccaactttttttttttttttcttttctcacaagccattgagcctgaggaactacaggctaaatttatgagcatttcttgatatctacagagggctactaaaaaaaaaatgctgaatagacctttatggggaacaacaatgttaataggaaaaaaaggtgatatgtttgctaatgtctatgtcagtcttaactctctttaagattttggctcattttggcttaagagcctgcagaagtatgtaagttatcaaataggggagccaggaattggtttcttccttgccatttaagcttggcaaagttagagcaatttggaatggctatccaacaatgtgttctacttagtaaatactctcttgtttttcaggggatagttagctaaaggtagggttatctccaatatgttttgggatggatcgtgaagatcattccctttttattttgagacaggatctctctctcttgcccaggctggagtgtggcggcgtgatctgtagcctcgacctccccaggctcaggctcaggtgttcttcccacttcagcctcctgtgtagctgggactacaggcgcacgccactatgcctcactaatttttattttttgtagagatggggtttcgccatgttgcccagcctggtcttgaacttttgccggcctcccaaagtgctgggattataggtgtgagccaccaggctcagccattataattgattttcaaaaaaaatttagtttcttaagcttcatggattcaaattgagtgccatttggattttgaggcccctcagtggaaataatttgtttttagcaagtaattatgatatttctaaagtgcaaattcactgacctactttctgtgcttctggaaatgctgaatcgaataatctttttttttcctcccaataatccctctgactgtgaaaacattctccatatgtattcagattgggatagttggtaaaaaaaaaaaaaaaaaaatttttttttttttgagatggagtctcgttctgtcggccagtctggagtgcagtggtgcgatcccagctcactgcaacctccacctcccgggttcatgcgattatcctgcctcagcctcccgagtagctgggattacaggcgcacaccaccacacccggctaatttaatttttttttttttgtatttttagtagagacgggatttcactatgttggccagactggtctcgaactcctgacctcgcgatccgcccaccttggcctcccaaagtgctgggattacaggcatgagccactgtgcccggcctttggaattttcttctaaggtagtacactagtatgagatgcgatgtctgagatttgtggataagtggacttttccttcttccattcctgccctcccagtgctcacctagtagggaggatgtttattatctaagatccagatgtgagacatttaaactgcttctttccttgtcttagaaataagaacagaactgtttttagcaaattttatttttttaattttttaaatttattattattatttttgagactgagtcttgctctgttgcccaggctggagtgcaatggcacaatctcggctcactgcagcctctgcctcctgagttcaagcgattctgctgccttagcctcctgagtagctgagattacaggtgcacgccaccatgcccaactaatttttgtattttttagtagaggtggggtttcaccttgttgcccaggctggtcttgaactcctgacctagtgatctttccgcctcagcctcccaaagtgctgggattacaggcgtgagccaccacgcccagcctatttatttatttttttttgagacagagtttcactgtgtcagccaggctggagtggagtggcaagatctgggctcactgcaagctctgcctcccaggctcaagcaatctcctgcctcaccgtgtcaagtagctgagattacaggtgtgtgccaccacgtccagctaatttttgtatttttagtagagacggggtttcaccatgttggccaggctggtctcaaactcctgacctcgtgatctgcctgcctcggccttccaaagtgctgggattacaggtgtgagtcactgctcctggccacaaatgttatattttaaataaataatacaaaatttaaaagataaaaaagtatataagcaggatggtggccatggaagtcagaatccactaaggagtatgtatcaactcacctgccaagaaaaagaaagtatatagtgaatacccttggaaacatctatgtttgtcttcctatcaatccagttcatcttcccagaggcaactcgtattattattttctttagatctgttccaggctggttgcggtggctcacacctgtaatcccagcactttgggaggctgaggcgggcggatcacctgaggtcagaagttggagaccagcctggccaacatggtgaaaccctgtctctattaagaatataaaaattagcggggcatggtggtgtgtgcctgtagtcccagttactcgggaggctgaggcacaagaatcacttgaacctgggaggcggaatggtgagctaaaattgtgccactgcactccagcctgggtgacagagcaagactttgtctcaaaacaaaacaaaaaacaaaaaaagtttgttccagagataccaggtacatataaagcaaatatgtatatttcttgtttttttttttgttgttgttgttttaataaatgtagcacactgttaatactatctgtatcttttgcttgtttttatacctctttttgtttttttttttttttttttttttgagacggagtctcgctctgtcgcccaggctggagtgcagtggcgggatctcggctcactgcaagctccgcctcccgggttcacgccattctcctgcctcagcctcccaagtagctgggactacaggcgcccgccactacgcccggctaattttttgtatttttagtagagacggggtttcaccgttttagccgggatggtctcgatctcctgacctcgtgatccgcccgcctcggcctcccaaagtgctgggattacaggcgtgagccaccgcgcccggccatttttatacctcttttgactgttactccctatcagcaataaagatacttggcacctaccttacactgatagacatacacagtttccagtcttttgctattacaaactatgctgcagtgaagaagcatatatatttggctctttgcatatatgactgtgtctgtagggtaaattcttagaactagaattgctgaagctgattttttttgatgttcgttattcatttattcaacaagaatttttgagttcctactgtgtgccaagtactgtggtaggggatgcaggggatgcagatagggcagtgaacaaattttcttggtctttttttttttgagacagagtctctctctgtcacccaggcgggaatttagtggtgcaaacatggttcattgtagcctcaaccttctgggctcaagcagtcctcccacctcagcctcctgtgtagctgggaccacaggtgtgtgcacaatttttaaaattttttgtagacgtgaggtctcactttgttgcctaggctggtcttgaactcgggcttaagcagtcctcctatctcgaagtgccataattacaggcatgagccaccacacctggccctgacttggtcttccacttacggtggaagactttttttttttagacaaggtttcattcccatcttggctcactgcgacctccacctcctgggctcaagtgattctcttgccttagcctcctaaatagctgggactgcagatgcatgccaccatggctaatttttgtagtttttgtagaggtggggctttgccaagttgcccaggctggtctttttttttttttagatgagttttgttcttgttgcccaggctggagtgcaatggcatgatctcaactcaccgcaacctctgcctcccgggttcaagcgattctcctgcctcagcttcccgagtagctaggattacaggcatgcatcaccacgcccggctaattttgtatttttagtagagacggggtttctccttattaggctggtctcgaactcctgacctcaggtgatccgcccacctcggcgtcccaaagtgctgggataacaggtgtgagccgccgcacctggccaaagacatttattcatttatttatttatttgttttagacagagtctagctctattagccaggctggagtgcagtggcatgatcttggctcaccgcaacctctgcctcccaggttcaagccattctgctgtagcctcccaagtagctgggactacaggtgcaccaccatgtctggctaattttttctgtatttttagtagagatggggtttcaccatgttggccaggctggcctcaaaactcctaacctcaagtgatcttcctgcctcggcctcctaaagtgctgggattgtaggtgtgagccaccgtgcctggcccaaagacatttattaaacaaataattattactgttgctgtaaatgctgtggagacagctaatggttagcccatcccaggttgattgagaggaagggcagtcagagaaggtctctgaggaattgacttttaagggtgaaacctaagaatgaagggaggacaaaagactgacctaggtagaggagatggcacaggtgaatgtcctgaggagggaaagaatgtttgtattttgaggaattgaaagaggttccagtgtggctggagcttagggagtgaaaaacagacaggtaggaggcaaggcttcagaatgtgagctgtcctaaaaaatgggtaaataggctggcatggtggctcatgcctgtaataccaacactttgggagaccaaggtgggaggatcacttgagcctagaagttcacaaccaatctgggcaacatagggagaccccccagtctctatataattaaaatattagctgggcatggtgatgagcacccgtggttctagccgctcaggaggctgagggaggaggatcacttgagccccaggagagggaggttgcagtgagctgttgcagcaccactgcactccaacctcggagacagagtgagaccctgtttcaaaaaacaacaactaaaagagtaataggatagtgaattttgaggtcagcttctaaaatagggcttttttttttcctgtcagttcttttactagtgttgatgatgagaccatcagtgtcataaagaagtctgatgcttgtgcagtgaaacagtttttataagaactttcctggatgaaacctattcttttagtcttgatttctcataggtcctgcaaatcaaacttggttggctggattagctcttaaaattttaggatcttagaaattgttttggagattaggcttattggggaacaatttttagattatgggggatgatgggattgttagtttaccagacttgctatttaggaaacagaaaacctatttacttttagtgggaggagcagggaggagtgtttaaaaaaagaaaaaacttatttactgttagggaatgttgactgttttaaaaataatcttcatggtgctagggagagaacagatgttcttttattttgaaccgatgaatatactgtcatacccatcatctaggccatatgtcttagcatgacacgtaagtcttgttggacacgcaaggtagcccaagggccattataattctgaatatatgaaagtgtttttatctgcaagtgtattgacttttgttcagaaatcacagtacttaaaacccagatggtcctgtttgatttagtacttctgtttaattggatcagcttgccctgtttttataacttaaagtagactcttgacttagcagcccatcactagtgatcaagggacggaaatgtgcaaattttctagcatttcagcaaggagcatctgtgtttctgatggcttaagggtattagaatgtaagagaagagactccttgacaatgaaagtcacagatttgttattagattatctgtggtgagttgggacttaatatattatctttgaaatgaggcatgacacttgtctccatgtgaagtctggatcagcattttatggagcatctgtttaagttttctttcaggccttttcttagtggggactgtcatcactggattttccttctatctgactgttctctgtgcttttctacctttttttttttttttttttgagacggagtcttgctctgtgtcccagctggagtgcagtggcacgatctcagctcactgcaacatctgcctcccgggttcaagcagttctctgcctcagcctctgagtagctgggattacaggtgcccgccaccacgcccagctaattttttgtatttttagtagagacagggtttcaccatcttggccaggctggtcttgaactcctgaccttgtgatccacccgccttggcgcctcaaagtgctgggattacaggcgtgagccaccatgcctggccgcttttctacttttatatatggagcgtgcagatgaagcctggctcttggaagttgggagctagtaataatatgagatatggctagcttaaaatctgagaagagctgtttttttttggtcatcaatgactaggtttcagcctgcctcgtaattgtattttaaatctaattaacagtttcttagaatgtctaaagattctttgattttttctttctttttttttttttttttagcagttagtggcattacattgaaaacaagacctaaaaagagagttaaggtaattgattttactttttttttttttttgagacaggatctggctttgtcacccaggctggagtgcagtggtgtgatgtctgctcactgcaacctctgcctcctgggctcaagcgatcttcccacctcagcgtcctgagtagctgggattgcaggcacatgccaccatgcctggctaattttttttttttttttttttttttttttgagacagggtctcgctctgttgcccagaccagagtacagtggcgtgatctcagctcactgcagtctgtggctcccaggttcaagcaattctcatgcttcagcctctggagtagctggaatcacaggtgcacgccaccacacacagctaatttttgtagttttagtagagacagggtttcaccatgttggccaggctggtcttgaactcctgacctcaagcagtccacccgccttggcctcccaaagtgctgggattacaggcatgagtaccaccatgcctggcctaatttttgtatttttgtagatgcttttgccatgtttcccaggctggtctcgaattcctgagctcaagtgatccaccttggcctcccaaagtgatgggattacaggtatgagccaccgtgcccggccagtaattgattttaatattaatttctctttttttttttttgaggtggagtttcactcgttgcccaggctggagtgcaatggtgtgatctcggctcactgcaacctctgcctcctggttcaagcgattctcctgcctcagcctcctgagtagctggaattacaggcatgcgccaccatgcccggctaattttgcatttttagtagagacagggtttcaccatgttggtcaggctggtcttgaactcccgacctcaggtcgtctgcccgcctcggcctcccaaagtgctggtattacaggcgtgagccaccatacctggctcatttctctatttttgtgcatacctttgcaattaattttggttatgatttcctatggtagattggaagttgctctcatatttgccctctgttagagtaagctgtggggttgttgatcactgtgtggttacacccaggctgtggcagagattcaggtcacattagccagcctgctgccatttgagttgagtcaagatactgattctagagttgggcttaattaagtctttaaaattttttgttttgtttgggattttctattctccttaactgcattggtaccagatccaacgttgaccttatattttgaaattttggtcagtttgtttatatggtgattttgcttatacagtgttagggttttttgatttttggtaattgttttttgtcaaaatagtaagaatacataaagaatcagacagtactacaaggcttataattagaaaaaaaacactactttatttctgcttgtttgtttttaaccacttttgcaattttttttccctgatgtatattatccatatttctatatagtatgtttaggctgtttattctttctttttttttttgatagatgaagtcttgctgtgttgtccaggatggcattgaactcttgggctcaagcagtcctcctgccttagtggggagtacaggtgtgcaccgctgcacctggctatacagttctttcttgagttttccattcttacatattatctgttgaggctgaaggtgatggcacaagcctgtaatcccagcactttaggaggccgaggcctgagattgggagtttgagaccagcctggccaacatggtgaaaccccgtctctactaaaaatacaaaattgggccgggcactgtggctcacacctgtaatctgaacactttgggaagccgaggcgggcggatcacctgaggttgggagttcgagaccagcctgaccaacatggagaaaccatatctctactaaaaatacaaatttagccaggcgtggtggtgcatgcctgtaatctcagctactcgggaggatgaggcaggagaattgcctgaatgtgggagacagaggttgcggtgagctgagattgtgccattgcactccagcctgggcaacaagaagaaaactccatctcaaaaaataataataaaaaaaacaggccaggcacagtggctcacgcctgtaatcccagcactttgggaggctgaggcaggcagatcacaaggtaaggagattgagaccatcctggccaacatggtaaaaccctgtctctactaaaaatacaaaaattagctgggtgtggtggcaagtgcctgtagtcccagctactcgggaggcgcacgcctgtagtcctagctactcgggaggcgcatgcctgtagtcccagctactcgggaggctgaggcagaagaattgcttgggagaacctgggaggcggaggttgcagtgagctgagattgcgccactgcactcaagcctggtgacagagtgagactctgtctcaaaacaaacaaacaaacaaacaaaaaaaacaaccggaaattatctaggtatggtggcatgcacttgtagttccagctatttgggaggctgagaggtgggaggatcacttgagctggtaggtcaaggctgcatgcagtaagccatgatcacaccactgcactccatcctgggtgaaagagcgagaccctttcttcaaaaaaaaaggaaaaccatttttgttatttcaaagaggatattttagatgcttacaagaccattggaaggctggaagagcatagatcagggaaacctcgttgcaggaatttcaagaaatggcttctgttaataatcttagctgccttaagcaccaaaacaggcagtttgcagaaaattagaaatggctgcaaaccacatgtctgccatctgtccgaggccacgcacgctctcgttgctactggagaagcaataatggcatctacccttcttccattgtgcaaatcttctttttttccttttttttttttgagacggagtcttgccctgtcacccaggctggagtgcagagtggcgcgatctcagctcactgcaagctctgcctcctgggttcacgccattctcctgcctcagcctccctagtagctgggacaacaggcgtccgccaccacgcccagctaattttttgtatttttagtagaggcggggtttcaccgtgttagccaggatggccgcccgcctcggcctcccaaagtgctgggattacaggcttgagccaccacgcccagcccattgtgcaaatcttaagtgttggtagaatttaaaccacaatggcactgatggaggattctgataaatgtagttcccaggcctccagatgaatccagaaggaagtagaagtgaaagttacaaaagaaaaaaaatttagcgcccagtataatgactgtatcattcgattacctttacttccttgtgtagtttttccctagacatagtaattgtcattcttttccttccttcccttttttgttttctgcttgttttacggaaagtcactgattcatccctaaactctgacaggtataaacctcttctcatcattgaagcacattagtggagcacctcttccagaggctttatgaaaggagtctttggagagtgagactttttttttttttttttttttgagacggagtttcgctcttgttgcccaggctggagtgcaatggcacgatctcagctcaccacaacctccgcctcccgggttcaagcaattctcctacctcagcctcccgagtagctgggattacaggcatgcatcaccatgcccagctaattttgtatttttagtagagaacgggtttcttccatgttggtcaggctggtctcgaattcccgacctcaggtgatctgcctgtcttggcctcccaaagtgctgggattacaggcatgagccaccgcgcctggcctctggagagtgggacttttttgaggccttgcatatctgaattacctcctttcttccttcacacttggcagtttgactggattaaaaaaattttttttttttttgagatggagtcttgctctgtcacccaggcccgagtgcagtgatgggatctcggctcactgcaacctccgcctcccatattcaagcgattctcctgcctcagcaccgccccgagttgctgggattataggcatctgccaccacgcctgggctaattttttgtatttttggtgactaaagggtttcattcaccgtgttggccatgctggtctcgaactcctgacctcggggtgatccacccgcctcagcctcccaaagtgctgggattacaggcatgagtcaactgtgcccagcctagatataaaattttctactggagattatatttctttggaaattataagcccttgctttgtggtcttctaacctttttttttcttttgagacagagaattgctctgttgcccaggctggagtgcagtggtgcaatcttggctcactgcaacctccacctcccggttcgagcgattcttttgcctcagcctcccgagtagctggaactacaggcgtgtgtagagatggagttttgccatatcagccaggctggtctcgaactcctggcctcaaccgatcctcctggcttggcctcccaaagtgctgggattacaggcatgagctgcctcactcagcctctttttttttttttttttttaagacggagtctcactctgtcgcccaggcaggagtgcactggtgcgatctcagctcactgcaacctccacctccctgggttcaagcaattccctgcctcagcctcctgagtagctgagattacaggcgcccaccatcacggccggctaatttttgtgtttttagtagagacggggttttaccatcttggccaggctggtcttgaactcctgatctcatgatccacccgcctcggcctcccaaggtttctaacttttaatagtggcattatgaagtttgatgctattttgactctagattctttgtatgggatctgtgttttttctctggaagactttaggatcttgcctttatccctgacattctgaaatgcaaccatgttgtgccttggtgtggatatttaaaaattcatcatactcagcattcagtggaccttttcagtctggaagcttatttcaatctatcctgggaaattttcttgtattatttcttgtattgataatgtattctcactttgataattatttatctcctctctctttctggaaacgctgttactcagatggtgaaactcctaggttggtactctaatttttttttcctattcaatttttcctttttttttttttttttgagacagagtctcactttgtcatcctggctggcatgcagtggtgctatctcgggtcaccgcaatctccgcctcctgggttcaagggattcccctgcctcagcctcctaagtagctaggattacaggcgtgcgccacaacgcccgcctgatttttgtatttttagtagagacagagtcttaccatgttggccaggctggtctcaaactcctgacctcaaatgatccgcctgtgttggcctcccaaagtgcttcggataacaggtgtgagctaccacgcccaaccctaatttttttttccttcattcaatttttgtgagatttccttagctgttcttccgactctctgttgtcgcttaattcctgttatcagtttgtttaatttccaagggctttttgttttttttttagacagagtcttactctgtcgcccaggctggagtgcagtggcgtgatctcggctcactgcaacctcggcctcccgggttcgaatgattttcctgcctcagcctcataagtagctgggattacaggcacacaccaccacgcccagctaatttttatatttttagtaaagatggggtttcaccctgttggtcacggtggtctcaaactcctaaccctgtctctactaaaataccaaaaaaaaaaaaaaaaaaaattagccaggtgtggtgacgtgcgcctgtaatcccagctactcaggaggctgaggtaggagaattgcttgaacccgggaggcggaggttgcagtgagtcaagatggtgccactgcactccagcctggcaacagagggagactccgtctcaaaagaaaaaaaaaaagctcttgaccttgtgatccacccgccttggcctcccaacgtgctgggattacagacgtgagccaccacccctgtctccaagggctctttttattatctgaattttacatgtatttttggacattgtcaggaattctgttttgttactttgattcttatctttcgtgttagagattttcttcagttgtttgataattcttagctgcttattcaatttttattatttatttgtttatttatttgagatggagtctggctctgttgcccaggctggagtacaatggcacgatcttggctcactgcaacatctgcctccccagttcaagcaattctcctgtctcagcctcccaaatagctgggattacaggcacccgccatcatgcccggctaatttttgtagttttgtagagacagggttttaccatgttggccaggctggtcttgaactcctgacctcaggtgatctgcctgcctcggcctcctaaagtgttgggattacaggtgtgagccactgcacctgcccttatttatttatttattattatttttttgagacagaatctcactctgtcgtccaggctggagtgcagtggcacaatctcggctcactgcaaacctccgcctcccgggttcaagcgattctcctgcctcagcctcccgagtagctgggattataggcgcttgccatcagtgtggctaatttttgtatttttagtagagatggggtttcaccaccttggtcaggctggtctgaaactcctgacctcatgatccgcccgccttggcctcccaaagtgctgggattacagacgtgagccaccgtgcccggccatttattttttaagagatggggttttgctgtggggctcaggctggattcaaactcctgggcttaagttatcctcctacctccaagtagctgggactacaggctcatgccactgtgtctggcttctgtttattttattttatttatttatttatttatttatttatttatttatttatttgagacggagtctcgctctgtcgcccaggctggaatgcagtggtgcgatctcggctcactgcaagctccgcctcccaggttcacgccattctcctgcctcagcctcccaagtagctgggaccacaggcgcccgccaccacgcccggctaattttttgtatttttagtagagacggggtttcactgtgttagccaggatggtctcgatctcctgacctcgtgatccgcccccttcagcctcccaaagtgctgggattacaggcgtgatccactgcgcccagccttggcttctgtttatttttaagaatgtgacactaagaagctcatcaagtggtggaccctactatagggtattgggattacaggcaccctggcaggctggtaaaaggactcctccagtcccctgcctagagagtataagccagtggcaggtgtttgagtgtaagtctggctgccaatgtttttggagccaagtgagagaaaggagctggggaggtaggagaggtctcaccgttgactcattaggcttttcacttgatacccttatttccgtcactgcccttagctgtgactagttcctttggactctttggttcagcttttctttttttttttttttttttttgagacggagtctcactctgtcatctctaggctggagtgcagtggcgctatcttggcccactgcaacctctgccacccggcttcaaaggattctcctgcctcagcctcccaagtagctgggattacaagtgcctgccaccgtgcccggctaatgtttgtatttttaatagaggtggggttttaccatcttggccaggctggtcttgaactcctgacctcaggtgttccacccaccttggcctcccaaagtgctgggattacaggcatgagccaccgagcctggcctggtttaacttttctaatttgcctggcagcatggggagggatggaggaatccatttgttatacagacttttctttttttttttaagatggagtcttgctctgttgcccgggctggagtgcagtggtgcaatctcagctcactgcaacctccacctcccaggttcaagcaattctgctgcctcagcctcccaagtcgctggcaactacaggcatgagccaccacaatcggctaatttttttgtatgtttagtagagacggggtttcaccaggttgaccaggctggtctcgaacccttgagctcaagtaatccacctgcctcggcctcccaaacttctgggattacaggtgtgagccaccgtgccagtcccagactttcaaccagtcctcctgtttagccccttctacactatcaccccatcttcccgaggtaccaggtgcctctaatttctgagacgttttgattcagaagttcatctgtggtgggaatctgcttgcttcttcccactgcagtgttttgttttttttttttacttttgtgaagttatttatcactagtgcatttgctttttaccttccaaaactttgttgacatctctctctctgctgtctcctttcccagtttttttgcttgttgtttggtttatgtctttataaaaaaaaatcctggccaggcacggtatctcacgcctgtaatcccggcattttgggaggctgaggcaggcagatcacgaggtcaggagatggagaccatcctggctaacacagtgaaaccccgtctctactaaaaatacaaaaaaattagctgggcgtggtggcaggcgcctgtagtaccagctactcgggaggctgaggcaggagaatgacatgaacccgagaggtggagcttgcagtgagccgagatagcgccactgcactccagcctgggcaacagaatgagactccgtctcaaaaaaaaaaaaaaaaaatccttttgctgtaattttaatggtgttttatgatggaacattgattaatgcatgcaatatattatgtttaacatgttattcaacatattcatcagcttttccttgccaatatccattcagacaccacagtgtctttacagttgattactaatactcctttagcatagtgttttctagacttccctaacaccaagaatcacttaaagtgcttgttggatatacagattaccagatcattctcctggaaaacttctgattttagttggtttagattagcgcccagggatctttttttaaagtgtgtttgtttttaaacaaatgccctaaatatgtcttatcttcaggcaagtttggaaaccctgctttagaaggattctttttaaaccattaatgccatcttacatctccatggcaaactccttagccttcccctaatactgcttttgtattcagactctgttttagcctgtctagctttggtctggatttctgaattagcatgtgtgtctttcctctgattaactcccctctttagtattaaatgttggctgatggtaataactttgggcttgtgtgacttcattttttttagtcagcgtctctaaacccgctcctgggatgtacaggggaggaaatactagttatgaacattgagctgctctgcaccaatttactaagtccaggaatcagtgtttttggtgaaatggaaaattgactcaggctttgaaaacagatgtcctaatctgccttgggtttatgcagcgtcatttttggagatgttgaagcactgtgatttgaagtttgtttttaactttacaatcaaaaggacacaattctcccttttgtattatagattcctacgcctagaaaagaaaaagggttgtatcttttgctgccagtctgtaaagtatctggaaatgtgtttgcagctgctccttggttgtgaattgcttagaggttaagagccaaatagtacttgtcttagcagtgttgcagaggctaactgtggtaccctagttctcagttcttggaaatcttgtggctgttattaactaaaatacagctgaggaggccatgttggctctgacatagagttgatttgcattctaagatgagcagctctatagaaatagctgtaatacaattttacaacttccattgaaacagttttttggaaggctatggcaggaggattgtttgaggtcaggagtttgagactggcctgagcaacatagtgagatcctgtctttgcaatcaaaataaaacgattagctggatgtggtagtcccagctactcgggaggctgaggtgagaagattgcttgagcctgggaggttaaggctgcagtgagctgtgattgtgccacttgcactgcaatctgggttgtagggtgagaccctttctcaaggaagaaagaaagaaaaaccaagaaattttttgttgttgttgttgttgttggtttgttttttgagacagtctcactctgttacccagtggcacaatctcagctcgctgcaacctccgcctgccgagttcaagtgattctcctgcctcagcctcccgagtagctgggattacaggcgcccgccgccacgcctggctaatttttttgtatttttagtacagacggggtttcaccatgttggccaggccggtctcaaactcctgaccttaggtaatccacctgcctcggccttccagagtgctgggattacaggcatgagccactgtgcctggccaagaaacagttttgatgaacaaagtcacaaaaacaaagctacatcgaaagtgttattgtctcattgattattggtcactggctgtgttataaggcatgactttgaactattactgatttactgcagttgactattttctgtacacgtccgcctatctcccagtgctgtacttcagtgctttcaggataatgagattttttctttgccttgaggggttgggcgtgaggtcattccctgacttctgttttggatgattttcagatatttaatttacatggcttttgcattagttattcctagtctgtctttttaaatgaagctttctttgcagctctggttatttaattgaacacaggagtagacttctcattgatttgtcatcattttagatgagaggactcagctcctgggctgccttgtatctgggaataacccatagtatctaatatttaccacataaggtagtatatgaaggtagtcttccgaatttacatttttagggctttaaaaaaataatctggggctggtctgatggtagtgggttatcagagcttattaacattagtgtcactgcagttggtatacaaaccccccactgctaaatttgactggctttaaaaaaaatctgggggaagaggaaagagtcacattagtggggaaagctgcgttttggggatgcattatgtttttgttaaaaaaatatgtttgaaagaatttcatcattcagtagttatatcttcttcctccttcattttctctttcagagaggagtaaaacatccaggtttcatttgttgtagaagtcctaggatttttcaggtttttttttttaagacagagtcttgctctgtcgcccaggctggagtgcaatggtgccatctcggctcactgcaacctctgcctaccgggttcaagcaattctcctgcctcagcctcctgagtagctgggattacaggcatacgccaccacacccggctaattttgtattttttttttttaagtagagatggggtttctctgtattggccaggctggtctaaaactcctgacctcgggtgatccacccacctccacctcccaaagtgctgggattacaggagtgagccaccacgcccggcccgatttttcagttttaatattcatgatggttatgtgattttttttattacttgttggatcagtcagatttgctgcatagttgaatttctgtgatgaaaatttctgtagttgaaaaatttttttcccttaagtaaccttggaattttaattaattccatctctacatgtgatagaaatctgtttcaccagaggtttgactgaattgaatttcaagaagtggtggcactttctccattgagaggagagggctgtgagctatagaaaaagcctttttttggagtggtagtggtaaaatgtgtgtaacatgaatgttattctagtctgtttccttgtactttagagaaaccagaaacactttagtggaaaccctctgttatagtctgtcctagaacacatggaggcaagtttttcattcctcttgacattattccctgtgtgattataggaacctgtttggttcctgccgttgttggctcctggagtggcatgtgactactcttaggcagctcctggctcttttctcattttggggttctttggcctagggactggatgccattatgccattgtagtaatgagctcctacctcccatgctggattgcttttcaggagcaaagctgaaggacagctgaacaggtgggcagattaccaacaggtgacttttaaccctggaaggccttcagttagtacttagtctctggatgagattaagccaggagatcaagtatagtctgtgggattaatgagataaccgatcgaacttctggtttgagtgtgaagctgtcggttcatttaggtttctttggttttacagtgttggtgtattggacagagaaggggactacttttggatttggaggatggcctatatataaagcctcagatttcatctcttctcactctgttctagctatcctggtctttttactagttctctaacacaccaactacattcccatgttagaattttttcacttgctgttatttcttttcggaatgctctttccccagatgtttacatggcatgctctgctcatggagagacttcttgggagagccagatactctcccccaatggccctttccctgtgactgtattattttatcattattattactattttgttgttgtcgtggttaaattctcctagatcctgaagcctgcaaccctatccaaaggaagactctaacctgggcagctgtagtcccagctactggggaggctgaggctggaggattgcttaagcccagacgttcaagaccagcttaggcaacatagtctggacaatctatctctaaaaaataaataagtaaaacaaaagaacattccagtctattcctatactctacctttatgattctctgttttttttactccttttatcagtaactgttatactgagattttatttcttccttcttacactagaatgtaagctccaagacagtagacgcttgtcttgctcatcttctagaacagggcttagcaacctcagcattgttgacaatgtagaccagataattcttttttttttttttgagatggagtcccgttctgtcgcccaggctggagcgcagtggcacgatctcagcttactgcaacctccacctcccgggttcaagtgattctcctgcctcagcctcctgagtagctgggattacaggcgcccgccaccatgcttggctgacttttatatttttagtagagacagggtttcaccatgttggccaggttggtcttgaactcctgacctcaagtgatctacccgcctcggcctcccaaagtgttgggattacaggtgtgagccactgcacctgtcctgaccagataattctttgttgtgggcggctgtcttatgcgttggaggatgttgagcagcatccttgttttctattcactagatgccagcagcactccctaccctagttgtgacaaatatgtcaatgacattgtcaatgactctggggaacaaaatccctcctggttgagagccattgttctagaaaaatactttggcactcagtgggtgcttcaatatttattaagtggttaagttgtggatacttaattggatgatggatgcatgagtgcattcagcatattaaaattttttggagcattgaacaacacgtatagccttgtgtttctttctttcctcttttcatagatatctccattcttctgtctgttttctgtttctggcatgttgatccattccttgctgcattttcctccacccagacttgcttgctcttttagacaatgctactcttttttttttttttttcctgagtctcactgttgcccaggctggagtgcagtggcgtgatctcggctcactgcaacaccttcctcccgggttcaagcgattctcctgcctcagcctccagagtagctgggattacaggcgcgcaccaccacacccagctaatttttgtgttttagtagagatggggtttcaccacgttggccaggctggtctcgaactccagaccttaagtgatctgtctgcctcggcctcccaaagtgctgggattacaggcgtgagccaccgtgccctgcctgtgctgctcatttttttttttttttttttgagactgattttcattcttgttgcctaggctggagtgcaatggcacagtctcggctcactgcaacctccacctcctgggttcaacgattctcctgcctcaagcctcccaagtagccaggataacaggcacctgacaccacgcccaaccaatttttgtatttttagtagagatggtttcactatgttggccaggttggtcttgaactcctgacctcaaatgatccgcctgccttagcctcccaaagtgctgggattacaggtgtgagccactgcgcctggctaggcctgtgctactcttatatttacttttgttcaattcagcaagtgactgctgagcagctacggtatgctgtagaataatgagagagaaccctagaaagatatggtactgtctgtgcttaagaactcatttgttggccgggcgtggcgactcatgcctgtaatcccagactttgggaggccgaggtgggcggatcacgacatcagtagttcgagtccagtctggccaacatagtgaaaccccgtctctactaaaaatacaagaaattagccgggtgtggtggtgtgcgcctataatcccagctacttggaaggctgaggcaggagaattgcatgaacctgggaggtggaggaggttgcagtgagccgagatcgtgccattgcactccaacctgggtgacagtgcgatactccgtctcaaaacaaacaaacaaaaacacaaaaacaactcgcttgttaaaatggacataggtgtatgaaatgttcctcgaaaatttaattcttatttcagggttttttttttttttttttttttttttttgagacaggatcttgctctgttgcccaggctagagtgcagtggcacaatctcagctcactgcaacctccagctcccgggttcaagcgattctcctgcttcagcctcccaaggtagctaggattacaggtgcgtgccaccaagcctggctaatttttgtatttttagtagggatggggtttcaccatgttggccaggctagtctcgaactcctgacctcaagtgatccacctgcctcggcctcccaaagtgctgggattacgggcgtgagccaacgcgcctggccttttttttttttactttttttgagacagagtcttactccttcacccaggctggagtgcagtggtgcaatctcagctcactgcagcctccacctcctgggttcaagtgattctcgtgcctcagcctcccgagtagctggagttacaggcgtttgccaccatgcctggctaatttttgtatttttagtagagatggggtttcaccaacttgaccaggctggtctcaaactcctgacctcaagcagtccaccccccttggcctctcaaatgctgggattataggctgagccagtgcacccagcctcaggataatgtttaaattgatactaatgggccaccatagggttaagttagtaattgttaaatacttatcagaatgggtgaaattgctgtcgaatttagaatccagttttaacaaaacctacccattcaatttttacttattttcatttgttgcaattgtctttggtttcttgctgttaattctatttttgtctgaaacctggttgaaaaatatacaaagtggacttggtcattttgaactttttgtttgatgtgaatgttcttggggttggttgttgtattgaaaggttgtgaaaagctgatacatcagtttttttttttaataaaaatttaaaagttatttctttttttttttttttttttttttttttgagactctctgttgcccaggctggagtgctgttgcacaatcttggctcactgcaacttctgcctcccaggttcaagtgattctcgcacttcagcctcccaaatagctgggattataagcacccgccaccgtgcctggctaattttttttataattttagtagagatgggggttccaccatgttggccaggctggtctcaaactcctgacttcaagagatccgtccgcctcggcctcccaaagtgctgggattataggcgtcagccactgtgcctggcctaaaaaatatttcttattaaatagagacaaggtctcactttgttacccaggctggtctctaagcacattcgatccttctgcctcagtctctcaaagtgctgggattgcaggcttgagccataatgccctgcctgactctctttctaccaaacatttatgtttcatctctgatgctgttagagagatttcatttgatttgaactatgggatcagaagaattccattagggaggagtgtctggaatctttttcttttgaagacacaactgtcttctccttagattatctgggagatagagtagtcaaagctgttgtggttttttcagagaggatcctgaaatttgttttacctatctctgtttctttgtattgagaaatggtttattaggatattaagtaattaaacatatattgaagaaataaagatgattttctttttgatatctcagattcctattcatatgactgattcttgtaaggaaggactgggaccttaagattttgctgagtgagggaggtggcctgtttttttaaggtcagtttttttcccttttgggattttgttcagtgctttgatacaaaaactgtaatttactttgtagtcaaaactgagatcaaaggaaagtactgttacctgaggcatgaaaatagaagatagcattaagatttagaatttttcttgattttcgtgtctttttaaaataacttgcaattgaaacctgagttttagagcagcagaatgccatttgaataaaggccccagattgtagtggtaactaggatacctcttagataattttaagtgtacgagaaaagcaagaactaaactggattcttcatttatcacgtgtaaagggtagtagttggtgtctttgtactaaggaagtctcctgtttttaaaatgtaggaatatttggagtgaaacattaggaaattgaatagaaaaataggctttgtctttttaaagatggatagaaggaagcagttttttttttttttgagatggctcttcgctcttgttgcccaggctagagtgcaatggcgcaatcttggctcactgcaacctctgtctgcctcctgggttcaagcggttctcctgcctcagcctcccgagtagctgggattacaggcatgcaccaccatgcccggctaattttgtatgtttggtagagacagggttactccatgttggtcaggctggtcttgaactcctgacctcaggtgatctgcctgcctcggcctcccaaagtgctgggattacaggtgtgagccaccgcaccctgccaggaagcagtttttaaaagtgcattacttgagttttatcaagacttatttctgaattc

SEQ ID NO: 60 - DNA, 171427 bp, Homo sapiens
agtttgcccaggttgatcaagaggagcaattttgtgtccagattggttcagatgaacctcagctatgtaaacccgaaccaccaatctagaagaaactgggaagtgatcaaatagctgaaataacgatctcgaagccctggggctacaatgcccaaggcttttgtcttctatacagttctggtaacctggctttcggatttcataatgaatagaaaataggagggacatggtgtaaagcaacaaaggggtccactaccagcaagcaataagaaacagcagccgacagcctggcagtgaaggaagtgacaaaagaaaagtttaaagcagacctgaatcttaaagaaataaaagaattggctgagtgcagtggttcacacctgtaatgccagcactttgggaggtcagggtgggaggatctcttgagcccaggaattcaagatgagtctggacaaaaaagtgagactgtctctacaaaatatcaaaaaattagccaggcatggtggtacatgcctgtggtcctagctacgtgggaggctgtggcaagaggatcgcttcagcccaggaggtcaaggctgtagtgagctgtgtccatgccacatcactccagcctgagtgacagagcgagaccctgtctcaagaaaaaaaaaaaaaaaaaaggaaaagaaatacaagaatttgggggattggccggacgtggtggctcacacctgtaatcccagcactttcaaaggccgaggtgggcggatcacttgaggttaggaatttaagaccagcctggccaacatggtgaaaccctgtctctactaaaaatataaaaattagccaggcatggtggtgggtgcctgtaatcccagctactggggaggctgaggcaggagaattgcttgaacccgggaggcggaggttgcagtgagccaagatcgtgccactgcactccagcctgggcgacagagcaagactccgtctcaaaaaagaaaaaaagaaaaaaaaaaaagaatttaggaccttgagtgtatgagcaaaaacactatcctggccgggcacagtggctcacgcctgtaattccagcaccttgggaggccgaggcgggtgggtcattgaggtcaggatttcaagaccagcctgggcaacgtggtaaaaccccgtctctactaaaaatacaaaaattagtcgtgtatcatggtgggtgcctgtaatcccagctactcaggaggctgagacatgagacttgcctgaactcaggaggcagaggttgcagtgagccgagactgtgccactgcactccagcctgggtgacagaacaagactcttatttcaaaacaaaaacaaacaaaaaatgtcatcttcctggggttgctggagaaacaaatcactcttatagcccagatcaatacctgagatattcctttttttttttttttttttagacagagtctccctctgtcacccaggctggaatgccgtggcgcaatcttggctcactgcaacctccgccggctgggttcaagcaattctcctgcctcagcctcctgagtagctggggttacaggtgcctgccaccacgcccggctaattttcatatttttagtagagacggggtttcaccacattggtcagtctggtctcaaactcctgaccttgtgatctgcccgcctcggcctcccaaagtgctgggattacaggcgtgagccactgtgcccagcccatacctgagatattcttaaacagttatgcatatgccctgattaagaacacagggacgtaaatgatacattttagaaggagtcccagaaaaaaaaaagagttaaatacccttttagagattaaacaagtatgcttcagtcacgtttgcaaaatcaacttctgtggaatgttggtgagaatgtggagaaattggagcccttgtgcactgttggtgggaaagtaaaatggtgcagctgctatggaaaacagtctggcgttgcctcaaaaaattaaacatagaattaccatatgatccagcaattccacttctgaatatatcccaaaagaattgaaagggactggaagagatattgatacacccatattcataatagcattattcacaatagtcaaaaggtagaagcaacccaagtgtccatcggtagatgaatggagaaacaaaatgtggtctgtgtttatagtggagggctcacgctggtaataccagcactttgtgaggctgaagaaggtggatcacctgaggtcgggagttcgagatagcctggttaacatggtgaaatgctgtctctactaaaaatacaaaaattagctgggcatggtggcacacgtctaatcccagctacttgggaggctgaggcaggagaattgcttgaacctgggaggtagagtttgcagtgagctgagatcacgccactgcactccagcctgggcgacagagcgagactccacctcaaaaaaaaaaaaaaaaaaaaaggaagggaaggctgggtgcagtggctcatgcctataatctcagcacttgaggaggcaggaagatcgcttgagcccaggagttcaagaccagccaggaggtagaagttgcaagctgagactgccccactgcattctagccagggcaacagagtgagatcctgtctcaaaaaaaagggggatcattctgacacatgctacacaacatggatgaaccttgaaaatattataccaagtgaaataagccagacacaaaaagacaaatactgtatgattccacttatatgaggtagctagagtagtcaaattcatggagatagaaagtagaatggtggttgccaggggctggagggagggggtggggcgtcattgttcagtgggtacagagtttcagttttgcaaatgaagagttctgtggatggatagtagtgatggtagcgcagcaacatgaatgtcatttaatgccactgaactgattaaggccgggcgcagtggctcatgcctgtaatcccagcactttgggaggccgaggtgggcaggtcacatgaggttaggagttctaaactggcctggccaacatggtgaaaccccatctctactaaaaattcaaaaatcagccaggtgtggtggtgcactcctgtaatcccagatacttgggaggctgaggtaggataatcgcttgaacccgggaggcggaggttgcagtgagccaagactatcattgcactccagcctggacgacagagcaagaccctgtctcaaaaaaaaaaaaacccaaaaaactgattaagatggtaaattttatgtttatttcactatagttatttaagaaatcaagctatgtggaattcgtcatctcccaagtgggtgcgtgagttattactggaattaaagttcaaaatcctccaaatcctttctgcttagcacggaggaagtgtggacaaagagaccccaggaccatgttgcggccatttgacacaaaataagcaaacagaagtgggtgaggggtggttaaaagctcagctgagacaggcacagtggctcacgcctgtaattgtagcactttgggaggccaaggcgggtggatcacctgaggtcaggagttcaagaccagcttgaccaacatggagaaacccagtctctactaaaaaatacaaaattagccaggcgtggtggcacatgcctgtaatcccagctactcaggaggctgaggcaggagaatcgcttgaacccaggaggtggaggttgccgtgaaccgagattgtgccattgcactccagcctggacaacaagagcgaaactccatctcaaaaaaaaaaaaaaaaactcagttgggccctggctgtggggtatccctctttctctgagaaggaaaggtgataacttcctgtagggactcccagtgctagtcagcacaacaggaagtttcctgggcagtgtgcacctagtaacagactctctctcttctgtccaggttgcctttttcctctacaatggggtgtcactaggtcaatttgtactgcaggtaactcatccacgttacttgaagaactccctggtttaccacccacagctgcgagcacaggtttggcgctacctgacatacatcttcatgcatgcagggtgagtacctgtcttcttttgctctgtcaaaagaccctacagaaaaataagtggtcaagatagcctggattgaaatatagtttttagtttatttttatctatttggacataggatttgggatggctgcttgaaactcatttaataccaaaatatacaagtaaattattgagagtgaatgggaaaggggaaaatatataagaaggaaaatgctaaaagccagcagtgagaacagcacacacatacacagcatttgattctatgtacttgctagacgtggcttgaaaatttattctagtgcttcctagtggcttcctagagcttttgctttggccactagagcaaaaagggagtcaagccaccagatttattgtccataactgtgtgtgagtgcctcccagtgtggtctccatatatagagagggtcttcttgaggaactctgacgataattatagtttctgtttatagaaccctgtagcctgttttggggctgcagcacaatcggttctcactggtgcctcccacttcatgataagggcctaccagctggccaggtgaccacccaggtccatatcccttgaagagcagtctggaggcttttatatggtagaagcactttgatgggagaggagagaccccagacaccaggcctctgtggtgtcttctcttctgtagcctctccagagaagtgaaggagctcacagttagcctggggaaaaccgtgggggtgcctggccctggagtgggaactgggaagggggtcactctggccccaatgacgccataattcccattgctcagcagaaagacccacaatggccaagagggagttgtcccatgagcctcccttccccttagcctctaaagcaggtgcaagagctaatcccaaattggctgcacctgcgggggagggtgctttcgggtgaagagacctgaatgaacgcctctgctcaggccaaagaggaccattggtacatgctgcttaccttgtctggcttgccccaggcttcgatcttacagggctaaggagcagcgggatggctgtcatgcttcactcacatccactcatgagccaggggtgacaacagacacgggggcttccctgcccaggcatcccaagccagtggctgcacgtgggttgggactgtctgccttctttccaggactgccccctgacctctcttggtgcctcagggtgaggaaggagaatagccaaagcctccttgctccatcctctgcctcctggagccaaaagcagtgagctgagggcatctgagccctgtcccaggagcttcccaggggatgtcagctcaatttaaatgagacagtgggtgttaaagtgctgtataaagttggaagcacctgattgatttagtaatagtcatgttacagtcttttctggtcacatgcacacagctagatgccccacaattttagcagcaagatgtagtcacaggtagtatagggaggaaggtgttcacagggtcagaaaacctggggtccagccgggcgcggtggctcacgcctgtaatcccagcactttggggggccaaggcaggcggatcacgaggtcaggagatcaagaccatcctggctaacatggtgaaaccccgtctctactgaaaaatacaaaaaaattagccaggcctggtggcaggcgcctgtagtcccacctactcgggaggctgaggcaggagaatggcatgaacccaggaggcagagcttgcagtgagccgagatcacaccaccgcatggatggtgtgagagagactgcctggatgacagaaagagactccatctcaaaaaaaaaaaaaaaagaaaaaagaaaaaaaacagaaaacctgggatcccatatcctagtcctgagggttttggagcagaataggtctcttttttttttttttttttttttgagatggagtctcgttgtgtcacccaggctggagtgcagtggcgcgatcttggctcactgcagccaccacctcctgggttcaagcgattctccttcctcagccccctgagtagctgggactacaggtgcatgccaccactcccagcttatttttgtatttttagtagagatagggtttcaccatattggccaggttggtcttgaactcctgacgttgtgatccgcccacctcagcctcccaaagtgccaggattacaggcttgagccaccgcacctggcctagatctcttcttataccagtaaagagaaacctctcttatgagactttaagggaaagctttgaattattaagttataagatgtatatttaatgcctgcacttgttttgagaacatatttttctttaaacacccgtagctcttttttattttattttattttattttattttattttattttattttattttattttttgagaaggaatctcgctcttttgcccaggctggagtgcaatggtgcgatctcggctcactgcaacctccacctcccaggttcaagctattctcctgcctcagcttcccgagtagctgggattacaggcacctgccagcctcagcttctctagtagctgggagtacaggcacctgccaccatgcctaattttcatatttttagtaaagacggggtttcaccacgctggccaggctggtctcgaactcctgacctcaggtgatccacctgtctgggcctcctgcagtgctaggattacaggcatgagccaccacgcctggctaacatccatagctcttacaaatagagccagaacatggccaggcgcagtggctcatgcctgtaatcccaaaactttgggaggccgaggcgagtggatcacttgaggtcaggagttcgagaccagcctgcctaacatggtgaaaccccatctctactaaaaatacaaaaattagccgggcatggtggcctgtaatcccaactacttgggaggctgagacaggagaatcgcttgaacccaggaggcagaggttgcagtgagctgagatcatgccactgcattccagcctagttgacagagcaacactccatctcaaaaaacaaaacaaaacaaaaacaaacaaacaaaaaacaaagagagccagaatgaccacatggcccagtgaatggagcaggtcaggcagattggagacctgaactgttgtgtcagcgtggccactaactgtggctggtcactatctctgaaccttggtttttcacatgttaactgatggagttgctggatctttttttttttttttttttttttttttttcagagatggtatctcactatgttgcctaggctgatcttgaactcctgggttcaagtggtcctcccaccctggcctctcaaagtgttgggcttacaggtgtgggccactgcgcccagcctagttgctggatcttgactgtggttagtctgtctcactgtgccaagtgaaatgctgccagtcacgcccaggccttgcacatctgttcctgtcccatctggaaggaacactctttccaagatggtctgtctgaattgtcattccttcccctagaccatgagctcctcgcaggcagaggtggtcttgttcattgctggatccctggcatcttgggggatgcaggtgtttgttgaatgaatgaatgaatgaatgaatgaatagatgaatgagtgagtgtggtctctctgtcacaggatagaacacctgggactcaatgtggtgctgcagctgctggtgggggtgcccctggagatggtgcatggagccacccgaattgggcttgtctacgtggccggtgttgtggcaggtaggcaggtaggccccgtgtccacaaaggcacactgccccagggtggggtgggagaccctgtggggcggggcaagccccaggtttccaggacacacagaagatcctcatctccaaggctcctgacttaaccaggctgtcctccaggcacacccacctccctatgaggctggagaacggactgctgcccatagagggaggtgtgtggcaggacgggggaggagagcactggatttgggacaggctggacaaccgactctcggtctcacaccaccatgtggtagctctctgagcttggggaaatttcctaacctcttttggccatgttaagctttaagagggaactaatgagatctgcctgtagggttgccaggagggcagagtgagtgaggcaacagatggaacaacagtgctccgaaaactgcaagggcacagtgagatccccacaggggaatcaaaggggtgagtggagccaggtaccaccctggccacgtagcacctgtccccaaaaagagagctggctgctacccagaccaaccgcagtccccttgcctgacccactgctgacagggagtctgacctaagaggcagtgagccctggctccatctgaaggcatctgggcctccagctgagtgggcacacgtgtggccagtgatcatccttcatggatagtggccagagtgactcccagtgagccttccaccttctgccccctccccagtgggaggtgaggtgggtgaagttagctggggagagcacggatttctgcaggaagcgtctgccagccaggcctctgaacatgaggatctccctcgtgatgtctccaactttattgccggctgtttttttttttttttttaacaaggtttgccgcctcagctcttcagcttgacagctgtgcccaagggagctttgtgtgtatgtttaagtaagatcttaatcctttctgagtggtattaaagttgtcatcaggagagccgggcagcgtcagccttgtaaacaacaggcaggcagggaccctgggagtaactgaagtggtttcagaaatcaaagaggaagggtcccaccccacccacacgaggctggtctgctagtgcatgaacccttggcctgggagattcaccctgcaccatctcctttgctcctgtatgcgctgaggttaaaatcgttggccaccttggtcagcacccctgcaagcccctcccagaatccaaggctcaccacgtccttgaataaagggctaatgagcatctctaagtgccagacttgttcagccacccacacaccccctaatcctgacatctgaggattgatagcctcattttccatacctcaatacccagagacccagatgttaaatagcaaggaacagggaagacattaataacatttgcagttagtattcaattagatgggaatgccaataacctagaagacaaaaataagattcaaatggactcagacctcacccaaaccaggtgacatgcagtggggagacagagtaggtgtcacctccccagtgacaccagtgcagagtgggaagattcaaacagaagcagagctcatcacctgaatgtgagcatgtagggctgtatcattgagcacatggcgtgcactgttctgtctgagtcagtgattaagaccagagggcactctggtcaccacacatgtcattgatctccatgattgagttgattgatctgtctctgctgtctaccctttcctgtcctcccaagctttcctctgagaggtgagccggtttacagccagccagccctagattggacgggtggcacttatcagtgcctaccatatgcaggccgtaattcatccacacagcaacgctacgaggtgggcactgctgctctcccccagcacagatatggaaaccaaggcttagatggctaagtggctcgcccaagaagacacagctagaaagtggtggagctgggcagggtctgacccccaaggctgtgatctcaaccactataatagtatgacgagaaccaaaaggtggtccttgtcctttttgcagttaatttattgtcagaaaccaaggcagaccaggtgcagtagctcacacctgtaatcccaatactttgggaggtcaaggcaggaagatcgcttgagcccaagagttccaggccaagctgagcaacatagggagaccctgtctctacaaaaagttttttaaaaattagctgggcatggtggtgtaggcctgtagtcccaccagctacttgggaggctgatgcaggaggatcgcttgagcccagaagtgcaaggctgcagtgagctgtgataacaccactgcactccagcctgggtgacagagcaagaacctgtctcaaaaaagaaaaaaagaaaaaaaccaaaggagaccttaatagatgtctggcagccttactctctaattccttcccagtgaaagtgtttccaatccacactttgtaatgaggatagctaacctctatggggcatatacatgctccaggcatatgatgaggggtttgcggatgatcgtggatgctatgctcatcactgctgtcctatatggtgggtactaccactcccattttacaggcagcccagggaggtgaaatgacttgcagatttgcttacctgaaaagtactagaactagggaggagcccttcccaagccctgtgcttctttccttttttttttttgattttgagacggagtctcactgtgtcacccaggctggagtgcagtggcatgatctcggctcactgcaacctccgcctcttgcgttcaagcaattctctgcctcagcctcctgaatagctgggattgcaggtgcccaccaccgcgcccggctaatttttttgtatttttagtagagacggggtttcaccgtcttggccaggttagtattgaactcctgacctcatgatccacccgccttggcctcccaaagtgctgggattacaggcgtgagccactgcgcctggcagccccctgtgcttctttctaaccaatgcttgaggccaatgtgaaaatcacttatggctagcaattatatggcacacaatgtaggtattttaaaaaccagtatcttgggccgggcaaagtggctcactcctgtaatcccagcactttgggaggctgaggtgaggggattgcttgtggccagaagtcaagaccagcctgggcaacatagtgagacccccatctctaccaaaaaaaaaaaaatcaatatcaccaatcttatattatagattatatagattactaaccacgtgtgcatccccagggcctagcacagggcttggcacatgttaggcaataaatatttatagaataaaggaaagttggcgggcatggtggctcacacctgtaatcccagcactttgggaggccgaggcgagcagatcacatgagatggggagtttgagaccagcctggccaacatggtgaaaccctgtctctactgaaaatacaaaaattagctgggcatgatggcagccacctgtaatcccagctactcaggaagctgaggcaggagaattgcttgaacccaggaggcggtggttgcagtgagcagaaatctcatcattgcaccccagcctgggcaacaagagtgaaactctgcctcaaaaaaaaaaaggaaagatacgtaaataaagttacattacttaaagataaatgttctgccaatttttatttggattttttttaaggccaaagaagatgttgaagaacacctgctttaaaattttctgggctaaaattatcacagctgtaccttatggcaaagttgccagtttatctgtgtgctggcatgacctcagaattttggggtgcaggatacagaatttgtaatcctgatgagaactaaggcccatggtttgcctctgtgcagaggtgtggcatgtcactccagtttgccattctctcctagtcctctgcctccatgacctctgtggaattcatactggtcttatctgcctgtacctgttaggattgttcagagctctggaggggattcctccctggcccacacttcctgcccggggagggcctttattactgtgtttatgtgtacacagccccatgtttgtctttggtctctcccagttgctctagtccaggcctcacctgcagtcacttgaaagtctgcttttttttagttttttggagttttttttgagacgaagtcttgctctgtcatccaggctggagtgtagtggcacgatctcggctcactgcaacctctgcctcccaggttcaagcgattcttgtgcctcagcattccgagtagctggggggctatatgcatgcgccaccatgtccagctaatttttgtatatatatatatatatatatttttttttagtagcaatggggtttcaccatgttggctagattggtctcgaactcctgacctcaggtgatctgcctgcctcagcctcccaaagtgctgggattacataaggggtgagccaccccacctggcccaaaagtctttatatcaccaatgtgggggcaggtggattcaggccgttacctttgaggttccagaatcgggacccgagccgcggcccctggatcttaggccaagactcaggtcactgaatttctgatctggaaggaaccagggaggtcccctccagcactggcaaactgttctctaggccccatccccacttagccagagctgctgcctgtgttctgctccatgggttagggcgtccctgaaaagtttcctttgaagagagttttgctgctcaaaagtcagaaagccttagacctcattttatagacatgaaagaaaaccgaagcccaaagaattcagggactgtgcccaaggtcacacagctagctggccaggccccttccatactcctgccacaatcctacgctgacccctggccctagggtcaggactccgagccatggatagggtgagggaaaggtcagtgtgtgccagcttgaccctcgcaggggcccatccctgcctggggctgccctggggcggctctgccttggtggaccgtgctggggcaggggcgagggagtggactctgggccagtttgtacagacctgctctgagaagagaagccagcctagggaggctggggcttcctctgtccaaaaggtaattaatgaggagcagcttgggcagccagccctcattgtagccctgcaatgcagccttcgaagacagccccaccaggagagcgtgggaaacctttgtcatgcagatcctgctgcctgtttgtttgccaccctgggatttttctttcctgttatatatggctgaccctgtggctaagcagtaaaaaaagcaaaagcaaaagaaagttatctgacaatagatcaatacctaattaaagccagagggaaggcatgaaagatttatagttgccctggaaggggaggaggacttgggagtcctcagttcatgacaggttttttttgtttttgtttttgtttttgagagattacatcccccttgagaccaagaattggttgtggggactctctttcttgaaggagctcagtgagtaggggaggccttgatggaggtgggggcaggggaggtggaggagtttatcagggggctctgctgccaggtccttgggtgctctggttgctgggctgggcccagcctcctcctaagtccgtggatcttgcaccctatacagcctgcagaatttggctttctgcctgtccctcctttctccagcagctaattggctcttgagcccctgggcattttccagtggtaatttctgcacactcacccaggccagccacctctcatcctctgagccctgggctctacctcctagttatttttagtctcccatgtcctcccttggaagacaaagcattgatcacacttaaatgagaccagaacaataaatttcccctcttttctttgctcagcttccctcccaggacaaaagtttgtcatcccccagaccaagcctcgcatacccttcctttcccccagagggtatgacatcatctctctctcttccccatgacttttcaaggacatgtttcctccaaaggagccccactggagagatgctgttggccttttgtgatttagctgggctggaggaagggtggacgtaaccctaagcagttttctagatgctgttgaacagagggagagatggaagaaggtggaggttaacctctgggccagtttggggcgtggctgctagagaggccaagagtgcaggctttggtcaagaacacgggtgggttttgcatcaggcagacccagatgcaaatcctggttccggcacttcctaccaggagactctgggcttagtctcctcatctcaggaatgaggctactggcgcctgcctcagagggctgtcttgaggattgaagggaagaaagtctgtaaaatgtttgcttggtatccgtgtcacctaggtggcagctgtttcttcaataactactgctactatttttgttatggttccagaaccctgacatagcaccatgtcaggcagacattggattgagaggcagataatccaggtagaagtctgaattttactttgggcaggacacttccctctttgagtcaaagaatcaaatggttctttcagccagaaattaatcctctaagaaatgcactggaggcagggctctgtggctcacacctgtaaccccagaactttggaaggctgaggcaagaggattgcttgagtccaggaatttgagaccagcctgggcaacatagtaagactctgtctctactaagaaaaatacaaaaattagctgggcattgtggcgcacgactgtagttccagctacttgggaagctggggcaggaggatcacttgagcccgggggtcaaggctgtagtgagctgatcgtgccactgcactccagcctaagtgacagagttagaccttgtctcaaaaagaaagaaagaaagaaaaggaaaggaaggaagggagggagggagggagagggaggggaggggaggggaatctccctggcaacatggactcaaaggaggaagaggtggagcgtcttgctctggagtcttagcacggagcctgcagaatccaaggcctggggctgggttgggtgagccgagtcccgcactcctgagaattctcgctgtctttctgtactagggtccttggcagtgtctgtggctgacatgaccgctccagtcgtgggctcttctggaggggtgtatgctctcgtctctgcccatctggccaacattgtcatggtgagcacctcccgttctcaatgtgtctttctggccctgtcctctgccatcactgggcctgagtattaatccactggggctggctcaccaaaaaccaggcagacctgacctggagcagagttctcacacactcctcaccctctgcaggcccatttcaaatgagcgccttccagatgcgattcctattttctccagtcacggcttggcctaggaccatgcccatctgccccttctgcctctttcccattcaccaacgttaaagagttaacatttggtaccatcctggctaacgcggtgaaaccccatctctactaaaaatacaaaaaattagccaggcgtggtggcatgcgcctgtagtcccagctactcgggaggctgaggcaggagaatggcatgaacccaggaggtggagcttgcagtgagccgagatcgcgccactgcactccagcctgggggagagagtgagattctttctcaaaaaaaaaaaaaatttggtcactagcatatatggccattggaattgcttatttatcataggttgttaaaaatacaagggctttagagattatctcatcaaaattctcaaataggaaaggaggctgtgagaggttaagtgacttgtccaaagtcacagtcaagtttgtggcaaaatgagggcttaaacccgtatctcctgacaaccattcaagagtcatttcccggccaggcacagtggctcatgcctgtaatcccagcactttgggaggccaaggcaggcggatcatgaggtcaagagatcgagaccatcctggccaacatggtgaaaccccatctctactaaaaaaataccaaaattagctgggcgtggtggcacgctcctgtagtcccagctacttgggaggctgaggcaagagaattgcttgaacccgggaggcggaggttgcagtgagccgagatcgcaccactgcactccagcctgggtgacagagcgagactccgtctcaaaaaaaacagttgttcccctatcccagtctgtcatgggaggggggcaccactccatttctcaccctctgccttttcctgaaaggtagtacagtgtgatagtgaagaacatggtctttggagccagtcagcctaggtctaaatccctgctacactctgggcaaattacttaactgctttgcacctcactttctacatctgtgaaatggaatgggagctgggcacagtggctcaggactgtaatcccagcactttgagaggctgaggtgggcagattgcattgagttcaggagttcaagaccagcccaggcaacatggtgaaactccatctctataaaaaatacaaaaattagctgggcacggtggtgcatggctatagtcccagctactccagaggctgtggctggagaatcagttgagcctgggaagcagaggttacagtgagcagagattgcaccactgcacaccagcctgggaaacagagtgagaccctgtctcaatttaaagaaaagaaaagaaaagtaatagaatgacatacagtaaatgaaataaagtgcaaataaccacctatataaatgtaaatttaatttccttctcctgacagaagaggccaggatggggtcagactagacaaagccttgaaggccagaaattgggatctgatagtcttagaggatatcaaaatcctttttttggaggcggtctgaagtctgaaggctgatggaggagtcagtggctaaccctgcccgatccctctgctggcctgggagcctccgggtcttacttgtctatttcccagtacctggcatatggctgggagcatggtagatggtgcccactagattttagtgaatgaaggaaggaaggcatagcttttctttggggtcctcctgttctcacccactcctccatcagtgtcttcgcccacgtggcagatgtttgaatgctcaatgatcacagtgcacagggcttggcgttcctgaattatcccatgtttttcttccttatcaatctctctgtcacccaccctgctcccaaccctgtcccttttgttctcatcaaaatgcccattgtacattgagcaagagaagaaagagcacaagagggaggggaaaagaaaggaagagagggggagagatagacagacactgagtacctgcctatacttgctactggcctgaattttggcaccttcaggtgagtgctcagagagaggctgcgggtgttgggaaacgtggaacggtgagcctctcagtgtgtgtgtgcaggtgtgtttgcacatgcacacacttcagtttgttgaaaacctgagtgcatgggctgcctcccatggcccttttaaatgggtcattctgtatcagtgccacatctttccccagacacagcttttcctctgaattctgcctcctccactcccccctccccctgccccaattcctttcagtaggggaaggaaatgctaacctcctccctcccattccgcccaagacttgtatgtgtgtaggggtggtgaacaagctcaactgaaagagaacacagggaggaagaagcacgctggcattcataacgatgccctgttcccaccctcttccccacctcatgggaaacagccctgatggcccagaagttcccatggtgaaggcagaccactgaaggaccatggagtagggcacgtttgtcgagagaggtgtgagagcagttttgttccagttgatgcttctctctgtcaagtagcccatggcctgccgctgtggagatgagcagcctcatctgagagccccgtgccttccagaagcaaacggctttccttggccaactgggagctgtgcagtccccagagcatgacacatggggagcccttctccaggaggttgtgtgggttgggcgcgctggctcacacctgtaatcccagcactttgggaggtcaacacaggcagatcacttaagcccaggagttcaagaccagcctgggcaacatctctacccacctctaccaaaaatacaaaaaattatcctggtgtggtgtcatgcacctgtggttccagctactctggaggctgaggtgagatcacctgtggttccagctactctggaggctggctgagatcacctgagccagagaggcagcgggcagtgagctgagattgcatcactgcactccagccagggcaacagagtgaagccctgtctcaaaaaaaagaaagaaagaaagttatgtggtgtttattgacgatgaaagaaaactcatcgtctcattaaaaaggctggtttctctttgtcaagaggctacctttactcaaattagttcagtgctaagcagttcagagatgcgttgggtcgacccatatgaaatggccctttctggctgggcacagtggctcacgcctgtaatcccagcactttgggaggccgaggcgggtggatcacgaggtcaggagttcaagaccagcctgaccaacatggtgaaaccccgtttctactaaaaacaccaaaattagccaggtgtggtggtacgtgcctataatcccagctactcaggaagctgaggcagtagaatcacttgaacctaggaggcagaggttgcagtgagccgagatcacaccattgcactctagcctgggtgacagagagagagagaccctgtctcaaaaaaaaattgccctttctatgggccatcagcatttgaatattggcaaattcatatcgttctacctaatagatatactattgttttcagcttcaaaatgaaggtttggagtgtgtgtgtgtgtgtgtgtgtgtgtgtgtgtgtgtgagatacacagtaaagtacctcatcagaactaaaagtagaaaaagcatggacttgggctgggcgcggtggctcacgcctgtaatcccggcactttgggagggcgaggcaggcggatcaactgaggttgggagtttgcgaccagcctgaccaacatggagaaaccccgtctctactaaaaatacaaaattagctgggtgtggtggtgcatacctgtaatcccagctactcgggaggctgaggcaggagaattgtttgaacccaggaggtggaggttgtggtgagccgagatcacgccattgcactccaacctgggcaacaagagcgaaactctgtctcaaaaaagaaaagaaaaagcatggacttgagagaaaatccacatttgagtaccaatgtcaccatcttaatagctatgagtctattactcaacttcttggagccccagttgtctcatcggtaatcccatcttcacaaaacagttgtttgggagatgaaaaaatggacaaaatatttcaacaaaagatctggaatgcaaaaagccctataatcaagacttctttttttttttttttttttttttttttgagacagggtttcgctgtgtcacccaggctggagtacagtggcacgatctcggctcactgcaaccaccacctcctgggctcaagcgatcctcttgcctcagccccccgagtagctgggaccacgggctcgtgccaccatgcctagctaaccatgttgcccaggctggtctcgaactcctgaactcaagtgatccacccacctcagcctcccaaaatgctgggattacaggcgtgagccaccatgccccgccaagacttcttattttaaacactagaaatatacagatacacctaattgaataatttattaattgcctcctgctggccagagttccattttttaatctacaagatatttacttacacttcgctctgtatgattgatgttttcccaaaatgtttgaggtctgaattttcacaaactgaaccacattgtcaaagcacaagggaagatggttgcctaacagacactaaagatttctgttataaagtttactttattggccgggcgtggtggctcatgcctgtaatccctgcactttgggaggccgaggtgggcagatcacgaggtcaggagatcaagaccatcctggctaatacgtgaaaccccatatctactaaaaaatacaaaaaactggctggtgcggtggctcatgcctgtaatctcagcactttgggaggctgaggcaggcggatcacaaggtcaggagttcgagaccagcctggccaatatggtgaaaccccatctcaactaaaaatacaaaaattaggtgggcgtggtggcaggtgcctgtagtcccagctactcagaaggctgaggcagaagaatcgcttgaactcgggaggcggaggttgcagtgagccaagatcgtgccactgcactccagcctgggcgacagatagagactccgtctaaaaaaaatatatatataaaaaattagccaggcgtggtggcgggcacctgtggtcccagctactcaggatgctgaggcaggagaatggcttgaaactgggaggcagagcttgcagtgagccgagatcacaccactgcacttcagcctgggcgacagagtcaggctccatctcaaaaaaaaaaaaaaaaaaaaggtttactttattaaggaaaaatatttttgtaggacaaagaatcaactccctaatttatctgcgtcatactttcacattccctgtgttgggttttcttgaagtcatttcacaagaaaccgtttctaccagggatagatatagaaagctgtattggaatggaagctccctgcctggctttcagcctctgcactcttaacccgtttgggtgagcaagatgctgaggggactggttaccaacttgttcgctgtgggtgagtactatctcactctttgaggctctgggagaatgaaattaaagggcctgcaaaaggtttgtattccccaaagatctgcaggctttccagcttttatagcagcagcagtgctggctgcatgtgagattttttttcttctctcccgttgtttcagtgcactgattttattggcgggaatattggattagggaagtaaggcagctggttggaagcggggactctctagtttaacccctcggctgctgggaggcaggtcatatttactggcgttttttcgctccatttgtgggcagctgggacagacggcccaggcacatggaatgtgacctctgaagtgtgggtggacagagccctggaccaggagcccagtcagctcaccattcactcactgtgaccttgaaccagccctcctgaatcctcagtttcttcttccctaaagtgtgcggcagagggatggactggatcagcttggcaagctccagggctttcagggtccaggcagatgttgtaaactcataaagcgggcctgggaggtgctgtggcaaaactggagtcattcagattcagattttttcaagccactctgcagggcaaactccccgtctttgtctcaggtcaagatactgtcacacatttagatgatgcctactgtgtgccaggcagtggtcttagtgctttacatatattaattcatttcattctcacaaccacctgatgaggtggggaactgagataaggggcagttgttatctcaaattcacaaatgaaaatgacagagaagaaggaattctgagccaccccactgatggccaaccaggccaaaaataaggatggcgcatttaacatctatcccagatagggcccaggaggggcatggaggctggagacctcagataaaggagagagctgtccatacattctaacttactttgcctgatattatcactcaggacatagtgaaagagacactgtcttcagataagatattcacttaggccaggcttggtggctcacgccctacaatcccagcactttgggaggccgaggaaggtgaattgctcgagcccaggagttctgaaccagcctgggcaacatagggagaccccatctctacaaaaatttaaaaattagccgggtgtggtacagtgtgcctacagtcccagctagttgggaggctgaggtgggaggatcacttgagcccagaaggtcaaggctgcagtgagtcgtgatcatgccacttcactccagcctgggcaatagagtaagaccctgtctcaaaaggaaaaaaaagaaaaataataagatatttactcagagggggccgagcacaaatggctcatgcctgtaatcccagcactttttgttttgttgttgttttgagacagagtctcaccctttgcccaggctggagtacagtggcgcaatatcgtctcactgcagcctccacctcccaggttcaagcaattcttgtgcctcagcctccagagtagctggggttacaggcatgtaccaccacacccagctaatttttttatatgtttagtagagatggggttttgctgtttgccaggctggtcttgagctcctggcctcaagtgatccgcctgcgtcagcctcccaaagtgctgggattacaggcctgagccaccacacctggcctgttgtttttgagaaagggtctcactctgttgtccaggccagagtgtgctggtgcaatttcagctcactgcaacctccacctcctgggctcaagcgatcatcccacctcagcctcctgagtagctggcactacaagtgcacaccaccacgcccagctaattttttatagaggcagggtttcgccatgttgcccatgctggtctcgaactctcaggctcaagcattcctcctgccttggcctctcccaaagcactgggattacaggcgtgagcacctagcctgtaatcccagcactttgggaggccgaggctggaggaccacttgaggccaggagttcaagaccaacctgacaacatagtgaagttccatatctacaaaaaataaaaaatttagccaggtgtggtggcacatgcccataatcctagctacctgggaagctggggcaggaggattacttgagcccaggagtttgaggctgcagtgagctatgattgcattgctgcattccagcctggttggcagagtgaaaccctgtctcttaaaaagtcttctgtacttttgcttttaattgtgataaatgtacataccataaaatgtaccatcttaaagtatacagttacattttaaatgtacagttcaatggcattaagtacattcatacattcacattgtacaatcatcgccatctgtctccagaactcttttcatcttacaaaactgaaactctgtacccactaaacaatgactccccaccccctcctccctccagcccctggcaaccaccattctactttctgtctccatgaatttaattactctatacttcatctaagtggaatcatacagtatttagctttctgtgactgccttatttcacttagcgtaaggtcctccaggtttattcatgctgtaacatgggtcagaattccctcccttttttttttttttttttttttttgagacgagtctcactctgtcgtccaggctggagtgcagtggtgtgatctcggctcactgcaagctctgcctcccgagttcacgccattcacctgcctcaacctccagagtagctgggactacaggcacctgccaccatgcccagctaatttttttgtatttttagtagagacgggatttcaccatgttagccaggatggtctcgatctcctttgactttctgatctgtccgactcggcctcccaaagtgctgggattataggcgtgagccaccgccttttaaaggctgaattgtattccattgtatgtatatatcagcaggtgacaacgttatcctgccatctgcttcttagcttggaacatgaagattagtgaagattagactttctacctaaaaagggaaggcaggtggctcacctcaccttctgtgaagaaggggtggccggtcagtgaggaagagtcagggaagggaggaggtgggcaagaaaccaaatatatagacatatgtatgtatatttcatgtatccatccatccatagacactggggtggcttccgtgtcttgcctatggtgaataatgctgctatgaacatgggtatcgcttttttttatttttattttttttgagacggagtctggctcaagtaatccacccgcctcagcctcccaaagtgctgggattacaggcatgagccaccgcgcccagccgggtatcacctttaagggagaattgaaatccatggaggggacattatagggaaggaaagcctggcaaacaacagcaagaagaaccgttaggggtgagagcccttcccagggctcccagggagacagggagcaccccatcacgtgggctggagggccatcttgttggctacttggcagtgggtgtccgcctttgggaagagatgtcccattagatgattcccaagtttcctcccatcctagggtttcagcttgaagagggggctgcggtgcccaccatctgctaactgagccagctcagattgggtcgctagattcaggggagggcactgactcctgttttcttcctcgtctcctggcaaggctcctctgtgggcagacaccagcagatgacaccgatatcctgccatctgcttcctagcatggaacatgtcggcaagcgaagacaggctttccacctaaagcgggaccgcaggtggcccacacttcactttctgtgaagaaggggttgctggtcagtgaggaaggatggggagaagggaggaggtgggcaagaactgaaggctgtgaggatttccccctctttggcatgtgctctgtgtcctgcttgcttgactgaagtgttcatagatgttagtgtccatgccagtgttcagggcctctgtaaagttacacggatgttcctgcaacctcaaagaagtgccacacgtgcccccgagctgggcctgggccaggcagcaaaggcagattgggtggtgggaggaaaccaaagtcccctggttgtgccctccttccctggggcttatgtgttccaggaagattccgggcttatttctgtgcacgcgcacctctgtataaatggaatagtgctttgaatgcactgcaggagtgcctctcaaaggaatcctgtggtgaagtcttttgtaaagtgaaaagtccttttgtaaagcgaataattgtactgtttatctgctttggaggttccgagttttccaagattctcaggggagagagggagttgtttgaaggccacctggcccaccccctctccagtatctgattctcctctggagcatcctttccgagtgatgtgaaacccccgatggttgggaaactcacgaagcctgcaagacggaccattctatctctggagagctctgcttactagaaatggaaacttactctgagctaaaaagtctctctctgaagttttcatccattgcatcttctgcttgcaggttacactgaattgaatgtgccctttccttgtgttgactcatttgatatttgacaacaatgaacttgacccctcagtcccctcttttttgagctaaaagatcctggcttccccattcattcctcatttgcaggattttgagctcttttatcatcctggtggttctgtcttgactttgcttggttggctgtcctgcatcctttgcaaccgtggagctcagcaatgaatgcagctctgagatgttctctgtccacgttgaggagacagggcctctcctcttcctagatctggagtcccttcctcttgttagtccagctcaagaactcttatgacgggagtaaacttgctgttgcctaaaatctcaaagccatgtggtgtgttctgctactaagccacaaccctctcattcaggacttcacggagatccttattttaatgtcaggttttcttaagcaagacacaccggcagaagagtggtctaatctggaactgactgagctctcctttttccctagaactggtcaggcatgaagtgccagttcaagctgctgcggatggctgtggcccttatctgtagtaagtactgatggggcgctggggaaccaaagcctggcaccagggcctgaggttcaaagatggcacagttcctgcccttcacgggcttatggtcaagaaaaaaaaagtgggacatgtcaatggttagcaaaaaagtagggatattgtgagagctgtctgtcctgctgtgctgcttcgtaaccattcatcttttatttatttatctatttttaaaaattatattttcatctttttttttgagacagggtgtctccctgtgtcatccaggctgcagtgcagtggcacaatcatagctcactgcagcatcagactcctgcctgggctccggtgatcctccctcttcagcctcccaaatagctgggactacacatgtgtgggtccatgcctggctgtttaaaatttttggcagagatgggggtcttgccatgttgcccaggctggtgttgaactcctgggctcaagcaatcctcctgccttggcctctcaagttgctgggattacaggtgtgagtcaccacgcctggccttttattttattttattttatattttattttatttttattttattttatttattttattttattttatttttgagatggagcctccccctgtcacccaggctagagtgcagtggtgtgatctcggctcaccacaacctccacctcccgggttcaagtgattctcctgtctcagccccccaagtagctaggattacaggcacgtgccaccacgcccagctacttttttgtattttttgtaaagacggggtttcaccatgttggccaggctggtctcaaactcctgacctcaggtgatctgcccgccttggcctcccaaagtgctgggattacaggcatgagccaccatgcctggccccagcctattttttcatctttttattgacatataatatgcaaacagaaaagtgcttaaggaccagcacccagatcaagacaaataacttcctaacctttttggtcatggaactgatcctttgagatcccttgttgaaagtccaagaccctgtcgccagaaaaatacatatatgtgcactcatgtgcatacacacatatatcaaaagctgcagttttagcaggttcgcaaactgtaactagtccaagaacctctaggaacaagatgtcttcagggccctagttgggagagctcagttctacctacagaggtcattctgagtgttagaggcaagcaggtgtccaccaagtaaacatggtgtaagaggacatttcaggcaaagctgcagcctgaactaacatatagatgggtgaagggtcatggccagcgagttggttagcaaaaccaagaaattcgttttgggattgtgtgtgattttgatcagagataaagttagtgaaatagtatgagtcagattgttaagggctttaaatgctaagaaaagaaaatgtacttcactttgcgttccctgggatcccactggagggctttcaacaagagagttattgatggataaccagagttttagaaaaccagtcaggctgcagtgtggagaatagattgtggggacaagggggataagaccaaagaccaaaggccaaagggctctttctgagattgaaagagatgagtctgaacagaagcaatggaggtaggggtcgggcagtgtggctgacgcctgtaatcccagcactttgggaggccaaggtgggaggatcgcttgagcccaggagtttaagaccagccttggcaatatagcaagaccttgtctctacaaaaaaaaaaaaaatacaaaaaaattagcccggcatggtggcttgcgcctgtagtcctagctacttagactgaggcaggaagatctcttgagcctaggagttcaataccagcctgggcgacagagcaagaccctgtctccacacacacacacacaaaaattaaaaattagccaggcatggtggcttatgcctatagtcctagcccaggagcttgaggcagcagtgagctatgatcatgccactgcacttcagcctgtgtgacagagcgagaccttgccttaaaaaaaaaaaaaagaaaagaaaagaaaaggccaggcgcagtggctcacgcctgtactcccagcactttgagaggccaaagcgagtagatcacctgaggtcaggaattcgagaccagcctgaccaacatgctgaaacaaaaacaaacaaacaaaaaaaccaatgaggatagaagagggagtgaacgcattttctcatccagtcctccaaacccacctagaaagggtattattattagcttaatttataggtagaaactccaggctcagagagttaggttcctagcccaaggtcacccagctaagaagtgatagagccagaattcagagccagcctgtgccatttcaaatgtcccacatgttagccaagctagacagtaagcacctgggctttctctgggtcagctacctgctgtgtaggtaagaggaagactgagtctgaacaaacctgggatggagggtcaggtctgggagggctccacttcaattcacggagggtcaggcctgggaaggctccgcttcaattcacgtccaccttccttacttcttaccccatggctttcaagaaatcaggtctgcccctgaccctctgtgggtctctctggatctgtttcctggatggggctggagaatctctcatcccaggaaggaacttccagccttaaaacctgaggactccttgagtcagggtattagggtgcagtggggtggcagtgggtgtgtcatagcttctgcgtctgcttaggctctgagtttgttcgtttttgaggaaggaaagagaagcacgagtcttgttgtttaaaaaaaaaaaaaatccggccggacgcggtggctcacgcttgtaatcccagcactttgggaggccgaggcggacggatcacgaggtcaggagatagagaccatcctggctaacacggtgaaaccccgtctctactaaaaatacaaaaaattagccgggtgtggtggcacatgcctgtagtcccagctactggggaggctgaggcaggagaatggcgtgaacccgggaggcggagcttgcagtgagccgagatcgcgccactgcactccagcctgggcaatagagcgagattccgtctcaaaaaaaaaaaaaaaaaaaaaaatccaaccgtaagcatcataaaaactaaaatgctgtatcggagttggagaccatcatctttcatacctcctttatcaaaccctggacctggggagccaaggctggaaggctgtcccagggcaggagtgggagtgcggagggcggagggtcagtccctggatgcgccttttctgccatctatcggccatccttggagttgcagggctcagcccagaaggctgggcaaccccaagggaaatgaaggtccctggaggttctggcaccccctgcagtggttagggtggagagaagtgccctggctcattaactggtagctaaataggtataaaattcccctcaaagggctttatttcagtgtcaaatttgccttggtttttctcatctgtaaaatgggaataagaatatctaccctcagtgttcttttggtagtggataatgggatggcagtttcctagcgcccatccccacttgactggctgacccaagaagttcacacaagaagcgtggattggtgatcaggatgaaggcatcttagaatctgttacaggtctgggtgtggtggctcatgcctataatcctagcactgtgggaggctgaggcaggaaactcacttgagcccaggagttcaggcctgagcaacatagtaagacctcatctctacaaaaaaaaaaattttttttttaattacccagatgtggtggtgggtgcctgtagtcccagctacttgggaggctgagatggatcacctgagcccgggaggttgaggctgaagtgagctgtgatggtgccgctgtactcccgcctagagtgagacctgtgtcaacaagaacaacaaaaagaatctgttaaggggtcaattcagcagtttgttggggtcagggttttctttttttgtttgtttttgagacagtcttgctctgtcgccccagctgcagcgcagtagtgcaatctcagctcactgcaacctccacctcctgggttcaagcaattctgcctcagcctcctgagtagctgggattacgggagcccaccaccacacccagctaatgtttgtatttttagtagagactgggtttcaccatgttggccaggctggtctcgaactcctgacctcaggtgatccacccgcctcggcctcccaaagtgctgagattacaggtgtgagccgccgcacccggccaaatgtcacctctttagagaggtcttgcgtgactccccgggctaaagaatttccctccttaaaacaggcattgcttttaatcacctgtttccccccatagatgtctctcttcctgaaattatctcatgtatgtaattgcttactggtttattgctagaccctgtaagctctgggagaacagagatttgcctgcctccttcactactgtgtccccagtgcagagaatggtgcttggcctaatagggaatgaattcatgggtgggtgatgaagtgaaggccctcagcccctgctcagggccctcctgtgacatctctctgcttcctccccttgcagtgagcatggagtttgggcgggccgtgtggctccgcttccacccgtcggcctatcccccgtgccctcacccaagctttgtggcgcacttgggtggcgtggccgtgggcatcaccctgggcgtggtggtcctgaggaactacgagcagaggctccaggaccagtcactgtggtggatttttgtggccatgtacaccgtcttcgtgctgttcgctgtcttctggaacatctttgcctacaccctgctggacttaaagctgccgcctcccccctgagggctggaggcccaaggtcggggaggggagggaaaagcagcacccacagggagcgcctgcgaggtttcttctcatcaccagctcagctaggccgggcagacaaggacagaagactctgggccactgtaatgtttgtgtttagatttggacacacagtggagacccttttctgaaaggcatctggcggaggagttgatgtggctgctgtcgtttttctcggctgctctgatgacatcgggccagggtgaaggtctggggtggggtgtgagagtggccctccctcacctgggctgggcttcttccatggggccagggggtgccccctcactgctgcggattgagcagcagcttcttcctcctcctctaccctcagagaccctaagagacatgggaaggctcgaaggttgttgcgtccaggcatggcccctctctagctcagaaataattgcaggccatgtggtgtctccttgacacctgctgtgtctggggctccagtaagaagagggcctactggacatgtcagctgtgacctggctgaaaccagggtgccctcctgggctggttggtgtgcaccggggcatgatctgttgtgcctgggttgggcagagcagggagcctgtaggctctaggacccctcttgtgctgggggtacccagtgagagggacccatgcagggggaataaacttcattccaagttccaccctggagaagacagacccaggaccagcttcagacttctccctccctttcttccaggatattggcatctcacacgggtgccccagcctccatgcccagccttgttttagggtctttttctttccttttgctgccctgacactactttgtgcctctctttggttatggagacagtgttttgaaacattcatgcgtgtgtgtgtgtgtgtgcgtatatgtgtgtatgtgatgggaaaggtaactgaggcacgacagcgcctgcagagaaggcatggaggatgcagggggcccatgtgggcatccgtgagaggtggcagaccgtggtgtgctgtggttgctgaatgtccttgctttgacaaagcctgcccccttccttcccatctcctgtcccttccacacctgcccctgagcatcactgaccggtggcagaatggccctgctggagggagagctcaagccctccaaggatccctggatgctgaggtttgccaggttcagctcttgtttccgtctgagatggccttcatatccaaaaaggttccatcctatctcccttaggagagaaagagctttgggggcgcaagagaggctggggtaggaatgttgaggccatgtgtccatttaagttagggggacaggaggctacaggaagaggaattccagtttagttggaaaactttgcctcaggagaattgttgggtgcatggatgaacctcagagggagggcagccagtagcctcggaggcttggatgcgggagagaacatggtggttatcaaatccaccccaccccattacacaggtgagaaaacaagatggagggaatgaccctcctaacaggagctggtgcaggccccgaatggagggcatgaggatgacctttgacaaaagatgacactccctttatcgtgctcttggaattctcaaccactgacagcccagaagaacaaagaacgccaggcctgggaggaggcaggggggctgggcgtgtccagaaacaggggcaggagtgtgggaacggtcttcctccagcctggtgcccatcctggcccttgagtgtagcagggtccagggtcagtcaggccaggcatttggggtcttgggccacagtggcttcccatcctggtgactacatgtaaatgggctcactcactcactggcaggcgaggcccagccataccgcatcttggcccactgctaaatagattgccctggcctcatccacatatgtagttccctaggtcctgctcccctgcaccagtgccatgctgagggccgcagcctgtggcactgtgggcccacgcctttggcggtgttgcgtcagcctggggcgtcttgtgtgtgccctgcccaccgttctctgccctagtgatagaaagatgtagatggaagtcagtgcctcagaggaggaggctctgaggctgtggagctgggctcagggaagaccaggggaggatgcagaaggagtcaggacattgctgcctctgcctgggctgcagccgcactaagctgagcgatgaggtcctttcctggagggatggagaatcccctccagattcctgtcctggcccctggggattctgtggtgtgggtggaatgagcagagtgccacctctgtctggtatgacctggagagggggcttcctctcttaggggtgagaaagcattgaactagaagattctagaaatccctcatagaagcactcagctccctcggggactcccagggaagcttgttactgagaaggacagtggaggcggaatcgtgtctcccaccatgttaagtgtgtcctctgctgccaaggaccctcgtctacaccttagaccaccagccccagctgttctctgtcagcacacccacctccatcccctctcccaaccatgacttccaagcggggccacagggtggggtcatagggtcacttcacctgacccaggcctctccccaggtcaggaggcagctgtctggtcagaggggttctctttgtggcatctggctttctcctcagcaggtcccaccaccctctcagcagcacttccccatggccaaggctggccgtgtcctctgtgcctctttccttgtctgaggtggctgccagcccagggggtggtgtgtaaatcttcaggctggtggaggtaggttggccttttatccacaggatacagaaactgaaagctggggaatccccaaacagcagccatagactcactggctctcattaaacgggagaggaatcacagaaactggggaagggaaaacaaaccttcaaaggagaaatttcgctttaatgacaccattcatcattcgttttttaattaggaaaagctccctaatgaggctcttttgccagctaataggactctcgatttccatgagaaccattcttgcccagaggattaggggagctgttgctcaccacaccaggatcttcccccagcgtccaatttaatttgcaaatacgtaatgcagattccctgggtgccgtgaaagcctttcctggcatcattcatgttgctccccgtgctggctggaaagcacggttctcctctgccttaaaaacagtgcccaacagtgaactgcccctccgaggacttgagtaagtggaaaaaacaaaacacagactgcaatgtttgtttctaagtatttttgtattgtgtacattctgtatatttttgttgtaacatattatttgagcacagattccattaaatattttttttctttttccaagccattggttattcaggaagtgacctgaagggctggcattagggcctgtttcatctgggtctgggtcaggatgggtgggagagggtgaacagcagcggtggtggatccaggatttctataaaatacagattggggcatcagtgcttagcaccagtctgtagctgtgtgcatcttacttaacttttctcaaatcactgaactcttttgagtggttgatgaaagctgtgatttctcttcccataaaaatgtgtatgtaggacgggcatggtggctcacgcctgtaatcccagcactttgggaggccgaggcgtgtggatcacctgaggtcaggagttcaagaccagcctggccaacatgatgaaactccgtctatactaaaaatacaaaaaattagctgggtgtggtggcgcacgcctgtaatcccagctactcaggaggctaaggcaagagaatcgcttgaaccatggaggcagaggttgcagtgagccgatattgcaccactgcactccagcgtggtaacagagtgagactccgtctcaaacaaaacaaaacaaaaaaaaccaggccaggcgcattggctcacgcctgtaatcccagcactttgggacgccgaagtgggcggatcatgaggtcaggagttcgagaccagcctggccaacacagttaaatcccgtctctactaaaaatgcaaaaattaactgggcgctgtgatgggcacctgtaatcccagctactcgggaggctgaggcaggagaatcgcttgaaccctggaggcgaaggttgcagtgagccgagatcatgccactaaactccagcctgggcgacagaactagactctgtctcaaaataaaaaaaaaaaaaaaaaaggaaaagaaaagaaaatttaaatgctgcagaatctatccaagaacaaactttagagtgccattaaggctaaaggccaaagaacccacttctgtttacagtgtggagatccaacttccctagaaggagaaatcaggatcctctctgagcatcagtgctcttataggtcaacttcaggctaaagtacctgagccatttaaaggcaagctcctgccaggcgcagtagctcatgcctgtaatcccagcactttgggaggctgaggcaggcagatcacttgaggccagaagttcgagaccagcctggccaacatgaaaaaaccacatctctactaataatacaaaaaaactgccaggcgcagtggctcacgcctgtaatcccaatactttgggaggctgaggcgggcagatcacgaggtcaggagttccagaccagcctgaccaacatggtgaaaccctgtctctactaaaaatacaaaaattagctgggcggtagtggtgcgtgcctgtagtcccagctacttgggaggctgaggcagaattgcttgagcctgggaggcaggggttgcagtgagccaagatcctgccacagcactccagtctgggtgacagagtggaccctgtctcaataaataaataaataaataaataaataaataaataaataaataataaaggcaagctccttggagagccagaagctgttgaattctctgcctttgccttctctccctttttcactttcctggttcttcccttctattaatactagattttcattcttccacacattaataaggcacttcccaataataaggtaattaagaaatgaagggccgggcacagtggctcacacctgtaatcccagcactttgggaggccgaggcaggtggatcacctgaggtcagtagtttgagaccagcctggccaacatggcaaaaccccgtctatactaaaaataaaaaattagccaagcatggtggtgcatgcctgtagtcccagctactcaggaggctgaggcaggagaatcacttgaacccaggaggcagaggttgcagtgagccgagattgcgccattgcactccagcctgggcaacaagagcgaaactccatctcaaaaaagaaacaaacaaacaaaaaaaacaggtgcagtggctcatgcctgtaatcctagcactttgggaggctgaggtgggtggatcacctgaggtcgggtgttcgaaactagcctgaccaacgtggggaaaccctgtctctactagaactacaaaattagccaggagtggtagcacgtgcctgtaattccagctacttgggaggctgaggcaggagaatcgcttgaacctgggaggtggaggttgcagtgagccgaattcgtgccattgcactccagcctgggcaacgagagtgaaactccgtctcaaaagaaaaaaagaaatgaagacgatttcctgtgtacctactatgtgctaggcactgaggtaggcatttccacagctactttatgtgaactaggtataaatatccccctatttatacacaagggaaaaggttagagaaatttagttacttgctggtagtatgtggcacagctggcttcacacccaagactggtggtaccaaagttcatgctgtcagccctcaggtatttgcacaggactgtaagggcactaagcatgtgcaggcctcagggtctttgtttaaagatccatctcattgcattaggcctggggccatccagtaacaggaatgaacctcgggacattcactcagagttcatgtaataggaccttcaccttatcagccctcatagtagtttacaagaaaaaccacagctgtcgattcattactgcttccatatatatgtattttttctcttgttgcccaggctggagtgcaatgatgtgatctcggctcaccgcaacctccacctcccaggttcgagcaattatcctgcctcagcctcccgagtagctgggattacaggcacgtgccaccatgcctggctaattttgtatttttagtagagatggggtttctccatgttggccaggctggtctcgaactcccgacctcaggtgatctgctcgcctcagcctcccaaagtgctgggattacaggcatgagccaccgtgcctggcctatttctttatatttgagagagggtcttgctctgttgcccaggttggagtgtagtggtagtcatagctcagttactttgagctcctgggctcaagcgatcttccagcctcagcctcctgagtagctgggactataggcacataccaccaggtcctgctaattttattttttgtagagatggcatttcactgtgttgccaggctggtcttgaactcttaggctcatgcagtcctcctgccttggcctctcaaagtgctgggattacaggcctgagccaccacatccagccacatttaggaactttagcaattaagagaactggactgccctctcagacctccaagtggaaagacttcattgaagtcagcagggtttccattaagtgagaagacacactgttaggaaagtgtggtcctagtaactgcatcttatttccaagaagcccgcaggctttcctggcacctggtctaagggatcctctggtagaggacaggcattctgtcatggtgaataatgaatgagagtgaaaggaagtaacttgggttattgagttctatgagtataactctactggacaatgaataaaacattgtgagggaaattgctcttagattctgcttgatgcctcctgcaagaagcagaaaggtgtgtatcccagcaagtgatttgatcttcttcaacaaattccttagtatagcaagtataatttcctcacaaccttgttgggaatacaaatgttaggcttgaggactgagctcattaaacaaaaacaactgtcttgatgagaagctaagttttattattataattacaaattaattacagagaaactgaagccattcttcatacatgacaaacatacatttcctctgtgtgtacagcacacaagtaatatacacaaatatattccatgtctgaacaaatcctttttaaaactttaaaagctggctgggcacagtggctcacgcctgtaatcccggcactttgggaggccaaggcgggtggatcacaaggtgagaagatcgagaccatcctggctaacacggtgaaaccccgtctctactaaaaatacaaaaaattagccatgcatggtggcacatgcctgtagtcccagctactggggaggctgaggaaggagaatcacttgaacctgggaggcagaggttgcagtgagccaagattgcaccaccacactccagcctgggtgacagagcgagattctgtcttaaaaaataaaacaaaaacaaaaaaaaaaacaactttaaaagccaagatagtagcttattaaaatttgaatacagtacatgtttctagtcatgaactctgtggtttcttctcatgaccaagatattcagttccatgacaccattttccttgtctacagtagtgatacagagtttgtcagactttttttttttttttgagacggagtctcgctctgtcgcccaggcttgagtgcagtggtgtgatctcgactcactgcaagctccgcctcccgggttcacgccattctcctgcctcagcctcccgagtagctggaactacagacgcctgccaccacgcccggctaattttttgtacttttagtagagacggggtttcaccgtgttagccaggatggtctcgatctcctgacctcatgatctgcccgcctaggcctcccaaagtgctgggattacaggcatgagccaccacacccagcccagacttactttttttaaaataagactaccagaggccgggtgcagtggctcagtttgggaggccaaggtgggaggattgcttgagtccaagagtttaagaccagtctgagcaacatagtgagaccccatttcattaaaaaaaaaaaaagataaaataagactatcatatagagctgtgtaatgtagtgagcctacattacaaaaatatatacaaccacacagagaatatgtaattacaccttgcctatatccataaatgatttgaagcaggtaacacatttgcttttaaatgccatttacaacatagactcttgaatgacatgaatttgaaaatgaagtattttttcagacttaaaacgttgatgtgctaatgtagcttactttaaaaaatgatttccaagtggggaaccaactacattgggaaaagacagtcagattcaaggacagtgtcataaaattgctggttttccttagtcaccctgactttatttttttgagacagagtctcgctctgtcactcaggttggaatgcagtggcgcgatctcggctcaccgcaatctctgcctcccgggttcaagcgattctcctgcctcagcctcccaagtagctgggactacaggcacatgccacagttcccagctaatttttgtaattttagtagagacagggtttcaccatattggtcaggctggtctggaactcctgacctcaggtgatccacctgcctcggcctctcaaagtgctgggattacaggcatgagccatcgtgcccagccactctcactttaatactatgaaaaatgctacttagatttttttctatactgcctacattccaagttattaaagtttaaaaccgtatgaaagcatttatgaagattctgaattgtatttctcattaaaagaaaagaaatgtgagtcatgtcccgaggcttatgtagaggagaaagcagaaggccattgtcagtcattttgaaagttaaaactcagcacttaatgtgaatttagatccatttaagagaggattcctcagttttatgggtttgtgctcctctgagcatcctcagggaagtgagaacacaagacttctgttcttctaagcaaaaatcattatcaaatgaatttattaaagagctatcccgagcaaattgcaattgtatgtatgtagctacataggcttccatgggaattgtaaatggctagctgagggcactttcaattgattcagagtaaaacaatctgaggcttgtaacaaatgtacaaaaaactaaaatcaatgagtaactctaataggaagaaactgtttgcattccttatgttacagtttgcttgtaaactgtatgtactttgtttcttttctcaacactgttttaaaactccagcattttcacctaaaagaaaacacaggctcttcataaatacctgtgaacaaataaatgaaatggtgactgaaggcgatttctgcagtagctttctctcagagataattatttttttttttgagacagagtctcgctctgtcgcccaggctggagtgcagtggcgcgatctcggctcactgcaagctccacctcctgggttcacgccactctcctgcctcagcctccagagtagctgggactacaggcgcccgccaccatgcccggctaattttttgtattttagtagagacgggctttcactgtgttagccaggatggtctcgatctcctgacctcatgatctgcccgcctcagcctcccaaagtgctgggattacaggcttgagccactgcgcccagctcaaagataatattttatcttgaagctagtgcatcgatttgtaaagctcatttaattttctacatactcaggatttgcatattgacttaaaatctgactttatcatccatgccgttatcaactagacaaaaaaatgtatcaagcacccacaggatgcacagatctatctctgaactggtgtagtggtattaatctgttctaagactagaattacatttttttttttaagaagctacagtccactgaaaaggaagtattatggtttttctgagaagaaaagttgctaaatactgcagcaaactcaggcttttcctgagaaaagccacaaacaaaatcatctctgaaattttttaagcaacaacttcctgaagcgtggaatttatggggccagtgagacactaaaatttcacaactctcacatacattatctatctaggactcagtgaagatgttcttcagatttttatttaagttaaattggtaaaatacaaaaagaaaatctggattgagtttcaaatcatcttaaatagcaatcctatgaacaattataactgcaatttcaaacactaagacttaaatatacaacttgatcatacaattatctcaaaacatatgatcaaaaactttggtcaagagcttctttcatgaattcttcaaggacagctatcacatttttggcttcaggcatttcttcatgttccactttaacaatcttcaaaagtatatctccactaccacagttctttaggaacatgtaacatttaaacaaagcataatgattcatttctgcctgtcggataaatctcttcaaattgtttgtgtcttgtatggcctagaaaatgattacccagttaaaaatgtgttaagtgaaataataatgaagctcaaaaaataactcctatccagctgagaactcaacatatcttcctgaattgtttgcttttcatattaaatatttccaaaatttaaattgcagtatgctttgcccttggtagaagaagaaaatctccttttttttcttgtttcgctcttgttgcccaggctgaagcgcaatggcttgatctcggttcaccacaaactctgcctcctgggttcaagtgattctcctgcctcagcctcccaagtacctgggactacaggtgtgtgccaccacaccaggctaattttgtattttcagtagagacggggtttcaccatgttggtcaggctggtctcgaacttctgacctcaagtgatccacccgcctcagcctcccaaagtgttggaattacaggcgtgagccaccacgcgcagccaaaaatctcttatacaaaataaaaatactttaaaataatctacctagcatggtggctcatgtctgtaatcccaacactttgggagccccaggcaaaaggattgcctaagggccggtagtttgagactagcctgggcaacacagcaagaccccgtctctacaaaaaataaaaataattagctgagtgtggtggtgcacacctgtagttccagctactcaggaggctgagacaggaagactgcttgaacccaggaggttaaggctgcagtaagccatgattgcaccactgcactctagcctgagtgacagagtaagattctgtctcttaaaacaaacaaacaaaactaaataaggtgacaacacgtccccatcagaattttttttttttagacagagtctcactctgtcacctaggtcggagtgcagtggcacaatctgggctcactgcaacctctgcctcctgggttcaagcaattttcgtgcctcagccacctgacatagccaggattacaggcatgcgccaccaggcccagctaatttttataattttagtagagaaagggttttgccatgttggccaggctggtcttgaactcctggcctcaagcaatccacctgccatggtctcccaaagtgctgggattacaggggtgagccactgcgcccagcccccatcagaattttgaaaacttagccactgaaccagtttttttgtgctttccaactaagttaagtcacaaattgtaagactgatgttccttaaatataagcaagcattcaacccaatttattagaaatgatatgtatacagaagctgccaaaaaataaagtaaatgtcttctgataattccagttttgagaacatcctaattaacagacatcacagctataaagcaatttgttactctgtcactggtactaattaaaattcagacaaaaatttcatgtggcacttggcacacagccaactaattacctttagtttaaagttctccagtacttgtcggaaaagaaaagggttacctcctttggcaccatttaaaaaagcttgcatccaatcctcacaaaaccggttacttcctataaaacatttcagagagactaaataaaatgaaattttacaaagctttatttatttatttatttgagacgggagattcgctcttgttgcccggctggagtgcagccggagtactaactatatcgttagtagagatggggtttcaccatattggccaggctggtctcaaactcctgacctcagatgatccacctgcctcagcctcccaaagtgctgggattacatgtgtgagccactgcgcctgacccatttatttctttataaaaacacctataatgaattatttaagacatgtataatggcctaaaaaaacagtgtgctcaccacatggctaaggaataccaaaatggctgaagccccctgtatgccccttcccaatcacatcccccttcctttcccatcagagaggataatcattcccacagacgtctttaaacttttcccatatacctttgcacgtgtaagccttatctacattattctgcatatgttaaaacttttatgtattttttcttttatggctatttcactaaatagtatgtttgagagctatattgacacaagtagctctagttcattctttttcactgctctgttatattccattgcatgaatatagcagcttatcagttttcttgttgataaacacttaaattgcttccaattccttgctttttcaagtaatgcctttatggacattttaaaattcatctccttgtgtacacatactagaatttctttatgtacctaggtgtggaattgctaggcatggcatgatttccatgtttctagaattatattgttttcaccaagtggtttctcatggtttgagataaccatgtaaaactgcacaaggcaggaagaataaggttgtatcataggctctcagtgcaaagatggggactcgcaagagatgtaggaaggctgcttcagaggttgtagctcacctgcattgcagaactgaggctgggagctgctgcaatcgatgaccacagacttatgctgctcctctgtcatggccatgcacaaagaagtcatggtgccttcatgaataagtccttgaagactggccacactcagaaacctgccacacacacaagtccatttccacaaacaatattgcaggacggaaggatgaaaacaaatttattttgcactgggctggtggggaagggatggaaggagcagtttacaaacacagatgtcaatcttgctgtggaaaagcttttctctttgaaaaaactgttctttacctgttaatgtctctctttgttttttcatctgattctttaacttcaacaggagtgtaactcaaagcctatgagagaaaaataaagcctgattggtacatatattccagtttttcttgagcagctactcatgactaaatgtccccataagtccctaccacactggacaacaattgatgggcactggtcacaagctctccagagccttgttcagccactgctcattaacattttatagaatcaaaattgctctggatttttgttttccttttcaaattgttttggaaactatacctttcccagatcacttggaaaagtaattattttaaaatgttttatcctattaggaagactcagcatttgaaattcaactctaccttagtaatatcactttctagatctgagaaaataaagtgtggtctatcttgatagcaagcatagtttgaatatttggggagggatgggagtcatgttcagagaaaatgagtatgtttctaaatcatccaaagtgattctcagttaaggaaatgctctcatttggcagtacttacagcatgtagcagaaaggtaagcttttcctgaaagagaagaacaaccctttggattgggcatacaacatcctcaaaccagctgctcagataggattttatgtgactctccaggccccttgcctaaatcaagaaagaacatcatttgctttaatataagcctttcctttagtggacttcatattttcttcatcatatccttgatggtgaaaaagaccaggatagacacctccctttttaaagctaacaccaccaattcaaaaaaagaaattgtgatatacctttcctggcttgttgggcagggtgagggttaaatctgtactgaatttatttaaaacacaccaagaaatgcattctataaaatgaagagactgaatagggttccatgctatttcttcacagggaagagttgggcactcacaagtccctctcctcccactgtactgtgcactcaatggagatactcactcaataatcctcatttccctggcacctgtggtacagtgtctaaaacatgcatagtatgagcttattaagtgccttttgaattagtcatgtagatagagaattcattcgtattcagaatgtgaatggggaaggatacaagtaactcatcaaagcactccactccactccagatgtcagacatgctaccgtgagcacatctggctttctaggctatactgctccctgaagactagtgtcacacacgaagagctctagtccgggagaacaactctattagacttgcatcagttgctcactcctgcactatcccttcctctctcctgcagtatcttctaagtatgtgaaaagtataacttctactatatatgtaatgggtagtaaatttgtgagagtcatgactaacaactgctacaagctgaaagcattgtttttgtttgcttttttgagacagggtctcactctgtcatccaggctggagtgcagtggtgcaatcatagctcactgcagcctcaacttcccaggctcaagcgatcctcccacctcagcctcccaagtagctgggactacaggtgcgtgccaccatgcctggctaatttttgtatttgttgtagagatggggtttcactttgttgcccaggctggccttgaactcctgggctcaagtgatctgcccgctttggcctctcaaagtgctgagattacaggtgtgagccaccacacccagccagtttttcaaaggtttgaataagttgatatggatatgcctaattcataaaagatcaattaatgaaaatagaatgtttttaagaatctttgatgtttagttcaagaacagccatactattgcatagcatgtctttggtgccagaggctgcatggaccagtacttctgaccataatataaatcttatatgcctagaaatcaggaaaaggacatcctcttcctcgccaggcatgttactacatgccattgaatagatcgaatttttcatagatacaaaacatcagacgtagtcttgtgaaactttcagcacttacaggactatgtttcctgtatccctttaagatcacctgtaggctgggtgcagtggttcatacctgtaatcccagcactttgggaggccgaggcaggtggattacttgagctcagcagttcaagagttcaagacaagcctgggcaatatggcaaaaccccacctctaccaaaaatacaattagctgggcatggtggtgcatgcctgtggtaccagctacttgggaggctgaggtgggaggatcgctggagcccagaaaaggctgcagtaagccatgatcgtgccactgcactccagcctgggtgatagagtgagaccctatctcaaaaaatgaaaaagaaaaagaaaccacctgtaggctgggcacaatggctcgtgtctgtaatctcagcactttgggtggctgaggagggaggattgcttgaggccaggaatcctagaccagcctgggcaacaaagtgagatccccatctcgacaaaaaataccaaaagttagccaggcgtgttggtatttgcctgtagtcccagctgtttaggaggctgaggcgagaagactgcttgagccccaagaagctgaggctgcagtgagcctgatcgcgccactgccctgcagcctgggcaacaaagcaagaccctgtctaaaaaaaaaaaaaattcacctctctactagctcacaaggtggcaagtttctagaatacaggcgtctttgtgtctacctatatgatttgacaagtagagcaatcacagtatattaatcatttcagtcattattttatttttttaactctgtcgctcaggctggagtgcagtggtgcaatctcggctcactgaaacctctgcctcccgggttcaagcgattctcctgcctcagcctcccaagtagctgggactacaggtgcctgccaccatgcctggctaagttttagtagagatgaagtttcatcatattgaccaggctggtctctgaccttgtgatctgcccacctcggcctcccaaagtgctgggattacaggcgtgagccactgagcctggccccatttcagtctttaaaaaccattaagtcagtcaccttacctcacaattcatgttatttttcagcccttgaatgtacttgtccaattcaagcctgaaagtatgttcttaaggaagcaataaaggatgaataatgaagacagtatttcatctctcaacaagaaatataaaatctctcaaataatgtgagctgcaaatgcaaacaagccaaggcaaaatggccacatgaaggtatgaaattcaactaaatacacgaggagtagaaaagctttttggaggttggtagtaatattcttccacctgccttcccatgttttccttcctgatgttctcaaaaaccaaagaaaggatatagctcaagtcctttttcagaccctcctaaaaaacagaccacatattctgaagggttacgttcagagtctatcgttactgtttcaggaagcagtttttcattttggaaaaggcagtaataacaaccaactcggtaacctggaattctagaaaagaaagaaaatgtaaaatgcattattttggttactcatgcatctataattttgtggactgctctgaattctggtcatcttgatctggcaacaccattaaactgcccactaactcagagcttcccagacttctcgttggtgtacttgcagcagcaaagaaaaatgaatgtataccctggagggctttagttaaagcagccactaacatacatgaaatttctttgaattctcctgtcttatgtgaaaaattcacacaaatttcactctagttcatacccatgtttatattaaaaaaaagtatgttctcccctctcccaaagcttcacaaattgatgtttaaggcagatgtgcctgaaggtggccttatccttgggaagtggcctcaaactcctgaggacctgtatgctaacttcacggtctgagttgaactagaataaagaggtgtaatggaggccgggcacagtggctcacacctgtaatcccagcactttgggaggccaaggcgggtgaatcacctgaggtcaggagttcgagaccagcctggccaacatggtgaaaccccatctctactaaaaatacaaaaattagccgggtatggtggtgcatgcctgtaatcccagctattcgggaggctgaggcaggagaattgcttgaaccagggaggcggaggttgcagtaagccaagatcatgctactgtactccagtctgggcaacagagtgagactctgtcttaaaaaaaacaaaacaaaacaaaaaaggagaggtgtaatggaaagacagttggaattggactaagaatgctcatgtttaagcctgaactccatcaatttgaccagcctcatgacttaagtttacataaactctgagtttatttcctcatctgaaaatgaaaataagagagtatctgctatatttcccctttgtaaggaaaactacataaaagtttgtgaaaatacaaactgtatacaaatttagttttaataatcaacacttttcttcttctaagtacaaaacttattagcctgggcaacatggtaggaccccatttctaaaaaaaaaaaaaaaaaaaaattaaaaaaattgctgggcatcgtagtgcctgcctgcagtcccagctacttgggaggctgaggtgagaggattgattaagcccaggaggtcaaggctgcagtgagctgtaatcgggccgctgcactccagcctgggcaacaaagcaagaccctgtctcaaaaaaaaataaactaattaaataaagtgcaattgggtgccagggtctctgccattcaattaattccattccacaaatgtttatgtgtgaggcccagtgctcgggctgccagagaataaagacaaattctgcaggtctagtaggagctgatcttttggagtttctcatcacttctcatatttagttcagaaataaaaactcaggacacagcacattttgcacttactttagctccacagatgcaacattacccagcccttcaaagactgcacctcttgaaagacgcttagcaatgaaactgcgcagctctggctccacttcggatggtagattagtatctgccaaggagaggcttgacaaatgaaagacacacattctttaccagtggactagggtattcacacccattaagtcagacagaatggtaccaacgccaggggctcttttaaggactggggaaagctgtccttatgacccctattggtgaggcttctaggaatgtatgtcactaagtatgatctacctcatcaaatagcttaaaatattcctatctttccagctcattctctccagtactgtgactccactggaacccccaatccactgaccctacctctttttcagtctctcaagtttctcatctcacttccctccttattctgccttaattccatggtcagtcattataatcacacccctgcacacattcttatcttttttatctttcaactttattgaggtataattgatgatttaaaaatttcagggctggggccgggagcagtggctcacgcctgtaatctcagcactttgggaggccgaggcaggtggaccacaaggtcaagagatagagatcatcctggctaacacagtgaaaccccgtctctactaaaaaaaaatacaaaaaaattagccgggcgtggtggtgggtgcctgtagtcctagctactcgggaggctgaggcaggagaatggcgtgaacccgggaggcagagcttgcagtgagctgagatcgcaccactgcactccagactgggcaacagagggagactctgtctcaaaaaaaaaaaaaaatttttcagggctgggcaaggtggctcatgcctgtaatcccaacactttgcgaggcagaagtgggcggatcacttgagtccaggagttcaagaccagcctgggcaacatggtgaaaccccatctctaccagaaatacaaaaattagccaggcgtggtggtcagtagtcccagctactggggaggctgaggtgagaggatcacctgaggccggggaggttgacgctgcagcgagccaaagtcatgccactgcactccagcctgggcagcagagcaagaccctgtctcaatttaaaaggaaaaagaaaaaaaaaggatttctttttggctaatcaccaagcacactatcagtatgtggatttgtttgccccagccttgaatgaaccagccaatgaggaaatcaggatgaggttcctaggggataggaggaattgacggtttgactcagggaaagctcagtggaaatagagtatccactgacatgtacaggccagagatgcagggaagatgaaagcacatgcatgaattatgctgaagctctttttacctgaaatcatcaccagagggagtttctgcatttgtgccacttgggcttccgtcctcactgtcccctcgttgctgtgccaatctacaagccacaaaaccaatagtgctatcaattatgggctctaaaccaagaggagtatgggggcctggcaagcagggtaaggcaaggagtcaactaaaaatgctgcaaggtggaagtgcactgcctatcctcatgacaaggaaaacccatacagcagtgctgacaagagccccttctctctccaggccacttaacgggtggaggaaaggctaaatacccagaaggttcaaggaaactcctttaaaaaccaaacttgacaaggccaagaaggttccaggaaagtcagaaggaggaaaaagaggaatcaagaacagaggaaaaccagagggtggggatgggggtgtgtgtgacagaaatgggagaagtggggagataatgacagaaaggagaggggacgggaactgaaattattgagcatgcggggcactgcgctaaacaaagggcagccgcgagagtaagaggctgggatgatataggggcagatgaagggcacaggcatggttgggccaggcatacaagtccacgacgggggccaggaagagcagcgggaggcgaggagcgcccttcaggccagagaccttggctgggagaggagaagatggcttttaggagcggccgggccgctgggccgggggtggggtgcaaggccgggcggcgggccgggggcggggccgcaggggcgggcgggctggcaggccgagctgggcgccagcacctgcttccgcgatagctgtaaagacagtagtggctgctggacggcggctcgagtctccgctcctcggctgagcctccctcttcgctgctctctagttccttttcatctccatccatcgactcctgcaaagaggggagcattgcggcggcctctgagcggccctgtgtctccgccaaaccgctcccctgctcccgtgcagccgtcggtatcagggctcgtccggctcccggccctcgcacacctgcgttccgctggtttccccgggttcgcaggcaaggactggcctggaaagggagtctcttctccccacaggggctgacaggcgtactgagttcgcctttactgacaagcttttaccatttattttgaacttattttcctttgagacatctgggaaactttctatgtgataaaggtggcacaactacctagccacatggaaaagaataaggctactcgtctgcctccttgcgcgcgtgccagcacgcacagacacccgtttgatcaaaaagttaagaatttaaaatgaattttgttaaagtgaaaatatgggataattttgttaattcttgaagagggtctttccaaacataacaaaacacttagaagtcatacaggaaaacgtttaaaaaaatgactacgtaaaaactaaaaggccgggcacggtggctcacgcctgtaattccagtgctttgggagaccgacgcaggcggatcacttgaggtcagaagttcaagaccagcctgggcaacatggtgaaactgtgtctctactaaaagtacaaaaaaattagccacgtgtggtggttcacgcctgtaatgccagctacccttccagtctctgcccattacccagttctaacaccaattcacattttcaggtgtttgtttctgcaacaccccattctctggtaccagttttctgtctcagtccattttatgatgctataaaaggataccaaagactgggcaatttataattagctcttaaaggccccacttcttaatagtcttacaatggcaattacatttcaacatgaatttgggagtggacaaacactcaaaccatagcgccacgtgaaggaggaggcagactggagtgatgtatctacaaaccaaggaatgtcaaggattgatggtcatcaccagaagctaggagaggacatggaacagattctcccctagaggcttcaagagagtatgtccccaccagcacctccatgtcaacttccagcctccagaactgtgaaataatacatttccattgttttaagccaccgtgtgtgtgtgcatgcgtgtgttttgtgttttttttttttatttttagtagtgcaaactttattcataaataaaacttcataaagttaaaagcaggggcagttcctatttttaaaaaggaatagtggaaggcaacctgccatttcatttaaaattacaagttaggtttttcagatggataacagttgagatcgttaaatccccttcctgcttctcagattttcacaaaatagcacattaaatcctcagtcctaagcaattatggcagagattccaaattgcctctccatatcaaagtggatagcacagtttcttctcttgcaataaaggtactcatttgatgaacaagtgagtatagcagtcagattcttaaaagattgtattgcagaagttactgccatgtcttcattcgcaatgggtatcctcacctctatctcccattcagtaacattgtcagtttccttatctctcatttcaactacatttaaaagaggattctgattgcggacaacacatgacagaggcatttcagatcggcagtagtctcttgagatatacttgattttagttttaagcagaagaacttcctggagaggttgagttaccacagtcatgaggatggtagaaaaactcatagtagatatttggcaaaactaggttacaaggcagccatctcctagaaacacttcatcggggttcatatacaaattgtgaaatatcgtgggtttaatcctggcacagaaccaaaactgggtgcattgtacttgaatagccgaccagtccccagcacaggtccatatcaaggaattgagaaaaaagagcccatttaaccgcaaaatggtcttcatttgcccagactgaaagccaaatctcactcaggaaacagctgtatttttattttttatagagacagtgtatcactttgttgctcaggctggtcttgaactcctgggctcaagtgatccttctgccccatcctcccgaagtgctgacattacaggtgtgagccaccatgcccaggtggtacgtgttatagcagccataagaaactaatacagtggctgggtgtggtggctcacgcctgtaatcccagcactttgggaggccgaggcaggcggatcacaaggtcaggagatcgagaccatcctggctaatacggtgaaaccccatctctactaaaaatacaaaaaattagcccagtgaggtggtgggcacctgtagtcccagctagttgggaggctgaggcaggagaatggcatgaacctgggaggcagagtgcactccagcctgggccatagagccagactctgtctcaaaaaaaaaaaaaaaaagaaagaaagaaactaatacggccgggcgtggtgactcacacctgtaatcccagcactttgggaggccgaggtgggtggatcactaggtcaggagtttgaagccagcctggccaatatggtgaaatcccatctctactgaaaatacaaaagttagcctggcatggtggcacacacctgtagtcacagctactcaggaggctgaggcagaagactcacttgaacccgggaggcagaggttgcagtgagccgaaatcatgccactgcactccagcctgggtgacagagtgagactctgtctcaaaaaaaaataaataaaaataaaaaaagaaagaaaggaagtaatagagtcccccccaacaaccctttcttctattcttatctggatttcttcacattcttccctgttaatcccattttttctagattatggtttattctcttgatttgctcaagtactgcctccaatattagccaagaaagggtatatataaaataatttttaagctcttgcatgtctgaaaatatatcctcacgtctttattgtattttcacatttgattggatattccttagaaatagaattttaggggccaggcatggtggcacacacctgtaatcccagcactttgggaggctgaggcaggcggatcacaaggtcaggagttcgagaccagcctggccaacatggtgaaaccccgtctctattaaaaacacaaaaattagccaggcctggtggtgcacgcctgtgatcccagctactcagaaggctgaggcagaagaatcacttgaacctgggaggcagaggttgcagtgagccaagatcatgccactgctctccagcctgggcaacagagtaagactccatctcaggggggaaaaaagaaatagaattttagattgatatgattggacatcgaattctaggttgaaaagaattcccctggccgggcgcggtggctcacacctgtaatcccagcactttggaaggctgaggcaggcagatcacaaggtcaggagattgagaccaccctggccaacatggtgaaaccctgtctctactaaaaatataagaattaggcgggcgtggtggcgcatgcctgtagtcccagctactcgggagtctgaggcagcagaatccccatgttcgtcaggctggtcttgaactcctgacctcgtgatctgccctcttcggcttcccaaagtgctgggattacaggcatgagccaccgtgcctggtccgaatcaaccatttctccaaggacctcaggttgcttttactggagaatggtattacaaaccaagatctctggacaaagtatgcttgatatgggacattattgcttctaggccctctcagctgatatatgtatctatactaactttagtatatacacatatccataaatatttctctatgtatctattttaaaataaacacgagttcattctggtgtctccagctctaatccatggccgcatggatcattctagcctcctccccttgcttatctataaactcactacaacgagaggcacagcatggtggctcacgcttgttaatcttaacacttagaagctaaggcaggaggatcacttgagcccaggagttcaagaccagcctggacaacaaagcgagaccttacctctacaaaaaacacaaaaattagcaaggcatggtggcatggccctgtagtccctgctactccgtgggctgaggtgggaggatccattgagcccaggagatcaaggctgcagtgtgctacgattgcaccactgcacactaccagcctgggccaccgaaacccagctaatttttaattttttcatagagacaggatattgctttgttgcccaggctcgccttaaacttctggcttcaagtgattctcccacctcagcctcccaaggtactgggattacaggaatgggctagcgcaccaggccttctttaatttctaacagcaatttttttttgtttttttttgagacgcagtctcgctctgttgccaggctggagtgcagtggcacgatctcggctcactgcaacctctgcctcccaggttcaagcgattctcctgcctcagcctcccgagtagctggaactacaggcacacgccactaggcccagctaatttttgtatttttagcagagacagggtttcaccatgttggccaggatggtctcaatctcttgacctcaggtgatccgcctgcctaagcctcccaactaacagcaatattttattgcttattgctttcatagtaaaagtgttttaatctgtttatggtgctgtaacaaacaccacagactggggaatttatgaataacagaattgtatttctttctttctttttttttttggagctggagtctcactctgacaccaaggctggagtacagtggcacaatctcagctcactgcaacctccacctgccaggttcaagcctcagcctgggttctactgtctcagcctcctgagtagctgggatgacaggcacccaccacaatgcccagctaatttttgtattttcagtagagacaggattttgccatgttggcaaggctggtctcgaactcttgatctcaggtgatcaacccacatcggcctcccaaagtgctgggattacaggcatgagccaccacacctggccagaattttatttcttttctttcttttttttcccccgagatggagtttcactcttattgcacaggctggagtgcaatggcgcaatctcggctcactacaacctccgcctcctgggttcaagtgattctcctgcctcagcctccagagtagctgggattacaggcgcccgccaccacactcagctattttttttgtattttttagtagagacagggtttcatcatgttggccaggctggtctcgaactcctgacctcaggtgatccacctacctcagcctcccaaagtgttgggattacaggggtgagccaccaccacacccactgaattatattttcttatagtctggaaatttggaaatccaagatcaaggcactaatactcagtgtctgatgagggcattcttgctgcatcctcatttggttgaggcaagagagagtagagtttagttccttccagcactttaataaaatcactaatccccccccacccagtttactcatgatttaatcacctgctaaaggtcccaactcttaatgctatcacattggtgattacgtttcaagcagttggggggatattcagcacattgcaatacggttttaaactttttcatttttcaatttattttttcatagagatggtctcactatggtgcccaggttggtctcacactcctggcctcaagccaccctcttgcctcagtctcccaaagcacggcaattacaggcttgagcaactgcacccagcctgaactttttttttttttttctttttgagacagagtcttgctctgtcgcccggactggagtgcagcagagtgatctcggctcactgcagcctccgcctcccgggttcaagcgattctcctgcctcagcctccggagtagctgggattacaggcgtgccccaccacgcctggctaatttttttttggtatttttagtaaagaccgggtttcaccatgttggccaggctggtcttcaactcctgatctcaggtgatccacccgcctcagcctcccacagtgctgggattacaggtgtgagccactgcgcacagcccaaactgatcctttaaaattcaaatttaattcagctccacacatactttgtgttttggggcaaattattccagctctcttaagtctcttttatctcatctctattaacaagttgacaataatggctcctaccccagaggctgagacaaataatgttaaaactcactacaatgcttggcacacggtaggtgctccatggatgtctgctattattttttgcttttaatagtaacataatttacattactagttattattatatgctaagctctgttttaagtgcagccaagatgaagtttaactgccttgcccaaagtcaggcagctaagcagtggcactggtggactatgaacccaagcactggacttttaaccacctctcacttgcatgatcctccagttgccctcttagaaccactgtgccttctcagagacttcagctgaaatccaacttctgagaatgcttctagggttcgccagaacccgcctttgctagcctccctaggattatctcttgtgaccagcaccttcactgacagctccagtcttttttttttttttttgagacggagtctcactctgtcacccaggctggaatgcaatggcgagatctcggctcactgcaaccttcacctcccaggtccaagtgattctcctgcctcattctcccgagtagctgaggttacaggcgcctgccactacgcctggctaatttttgtatttttagtagagacagggtttcaccatgtcggccaggctggtctcgaactcctgacctcaagtgatccgcctgcctcggccttggcccatagtgttgggattactggcgtgagcaaccgcgcccggctatcagctccagtcttaccacgattagtttttcacgtgcccagcctcaaagacttaaactctttgctcccttacggagataccctttccttcaccttgcttgctcccgttgactcctcaagaaacctttcttatgtcgggcgcagcggctcaagcctgcaatccagcactttgggaggccgaggcgggcggatcacttgagcccaggagttcgagaccagcctcgctaacatggtgaaaccccattctactaaaaatacaaaaattagccgggcttggtggcgcgggcctgcagtcccagctactcgggaggctgaggtaggagaatcgcttgaacccgggagacggaggttgcagtgagcagagatcgcgccgctgcactccagcctgggagacagagcgagacttggtctcagaaaaataaaacaaaacaaagaaaaacaaaactttacttgacaacccaacgaccactaccactacagccgccctaggactcccgctctctgaggtcctacagcacttcgcatttccctcaacgccgcactgagaactctgcattgtgtactcgtctgtcaccaatctgcgagttacaaagcagagactaacttatttggtttagcatttaataggcacataatcaacatttactgttcaattgaaacaaaattaaaattgggcgctgtctctatctttatttgtgatcggccctaactgcactggcaatcttttccgtttttttgttttctgttttccattcgcatgccccttagcgtacctggggctccggctcctttacaaatgaaacccaaagtgctccgcaagcacagccagcgaaagcgaaaaactctgaaacggacaagatggctgccacctcttcgcgcctcttagtcccacccactcagggcggaggtctgcgtcatgtgaccctccccttcttggctccgcctcctaccgcagtgcttgacgggaggcggagcggggaacgaggccgtcggccattttgtgtctgcttcctgtgggacgtggtggtagccgttgggttgggaaagtgagggatttttggcctcgtttctcctgcttcttttctcctcccttttactttgccggtagaacacagttatgggtcgcaagaagaagaagcagctgaagccgtggtgctggtatcctttgtcggtttgaagtcgaggtcgcgttggggtgccggttgttggggcctgggactaggaggcctggatttggcttacggcgtggagcgtttgtatttaggcgtctgcgtgggtggcctggtggctgggattggacttgggaaggcttctaggaaaatggggttccgaggtcgacaggcttttgcagttgtgggtcgtgtgactctgtgactcaggaggatcttgttcggtgcgaattttggactccgggaggcggcctggacccctccgccagggacagtgtcccctagggactattcagccaccttccgttgttttggtgacgattcaacaagggacttttcttcgagtgcgataggcttattactttcatggagggttggggacagcttcacagtctgtcacccactttttctgtttttatttactttatgtgtgttttgtgtttattttttcgaattggcggtttagtaaagaaccaagttagtcaaccctggtttcgaacctttttttttttttttttcttttcggggcgggaggagaactagcttccgtgtctcacccagaggcgccttaatcttcaggaagcgttctcacagggcggagtttctgttacccaactttgtaggactaaaaagtgcctatcttattaggaaaactcttactacagtgtggtattaatgctttttctggaagcgttaatattctttacattaaaattgattttatttactgttttgtacgtaaaggcggcttgttacagtactgcgtttatgtaacagttttaaaaatagcttaaatacggttacgaattttgtaatgtgattttaggaaaatctgagtagtgaggtaagaattctgttttattgatgtaagaattctgctttattgattttattgatctgtgaatttaaatacattgcttggcaacataaattcatacggaattggaaacaactttatggattgttcattcgaaattatgtgattattgttcaccatatagttactcttagattctaaatattgctaaattcctaatccagttattgctatcgtcttcatatctagtgaagtaattgtcttgacagaaccttagggatttcttaactgaactctttcctgtcctcagtgtgcatttgtaaatgttgaaatatttataacaaaagtttcaccgacatctctgttaaacacaggaatttgacaaagtatattgctgattattgagatgtgttttttggggtggtgaagagagctggccttctaggaaattgaaaatactgaaataacatggcaagtgtagtccctaattgtgtaataaatataaaaagcagagtttctatacagtaccattttggttttagctgttcccatattgtaatgttatccatatgtttttattataggcagtgtcatcattaggctgtctttgtgccttaacagtattgatcaggtattgtaatagagattttgatgatgagaagatccttattcagcaccaaaaagcaaagcattttaaatgccatatatgtcacaagaaattgtatacaggacctggcttagctattcattgcatgcaggtaaggatttttcttctgtatttattgtccgcttgtgatttggaaacaacttgaaagaataatcttttttatttttttgagtttcggtcttgtcgcccaagctggagtgcagtggtgcaatctcggcccactgcaacctctgcctctcgggttcaagctattcttctgcctcagcctccggagtagttgggactacaggcagccgccaccatgcccggctaattttttgtatttttagtagagactggggtttcaccatgttggccaggctggtctcgaactcctgacctcaggtgatccacccacctgggcctcccagagtgctgggattacaggcgtgagccaccgcgcctggccgaaagaataatcatttatttctctgacaactgtagttttgttttttttttgttcacttacttactgcaaaagataagatagccaatcagcattaaaaaaaacaaaaaatttgttcgatagccatcaagacaataaacaaaactggctttttatgtttaaagagggtttgtatttgtatttagtttgatagtaccttactaggttagattggtaacatatcgaaatcactaaatatttcctgagtacttggagcagagaacaaggatcagcgatttagattttgtaggtggtctggccttaagaattaatacttaattagcagtcattactcactgccattgaaggatctgttattatctgtagcttggggctaggctaatttcagcaatttatttattggacttcttttggaatggcagcattgtactttttgcttttgtttttaagagatggccttgctctgtggcccaggctggattgcagtgacatggttatggctcactgcagcctcatattcctgggttctagccgtcttcctgcctcgttctcccaaagccctgggattatgggcatgagccattgtgccagcccagaattgtatttcatttaataatttctaggtttcggctgggcgcggtggctcacgcctgtaatcccagcgctttgggaggccaaggtgggcggatcacaaggtcaggagttcaagacagcctgaccaacatggtgaaaccccatctctactaaagatacaaaaattagccgggtgtggtggcatgggcctgtaatcctggctactggggaggctgaggcaagagaatcatttgaaccctggaggcagaggttgcagtgagctgagatggtgccactgcattccagcctgggcaacagggtgagactctgtctcaataataataataatgacaataatttctaggtttttaaagttcttttaataaatagcgagagcattgtaatttatattttttaagatctagtaagtaccttcatgtctcattcaacattattctactttgcttagtcctagagctgtctgaatttttgctaaattagaccttacagaaatatgagatgagcaaataccaaatcattggaaactactatgggtgggaggtagggagacgtgatttctccaggtttaaagataaatttatatagatccttttcactccagatactttaacaataatttaatattcattttaaaatgttgaccagatgtggtggctcacgcctgtaatcccagcactttgggaggccgaggctggtggatcacctgaggtcagggtttcaagaccagcctgaccaacgtggtgaaaccccatctctacaaataccaaaaattagctgggcatggtggcaggcacatgtagtcctggctacgggggcggggggagggctgggggcggggggcgcgaggcgggtgctgagacaggagaatcacttgaacccgggaggcagagtttgcggtgagctgagtttgtgccactgcactccagcctgggtgacagagactctgtctccaaaaaaaaaaaaaaaaaaaaaaaaattgttagagaacctactacatgttagactcacagctgttcactgttgcagccattagttacatgtggctatttaaaatgatataaatatctaaatgctcagtttctctgtcaagtagctaacttatattgggtagtgtggataagaacattttgttttgattgattgacagggtctcattctgttgtccaggctggagtgcagatcatagctcaccgcaactttgaactcccttactcaaatgatccttccaccttagcctcctgagtacctgggacaacaattgtgtaccaccatacctggctatttttaaaattttatttttgtagagacagggtctcactatgttgcacaggctggtcgcccaactcccaggatcaatcgattctcccactcggcctcccaaagtgctggaattacagttgtgagccactgagcccggccattttctttaattctgaatgaaataggggtttaaatagagatgtatgctctgtcagttttttttttgttttattttgaaacggagttttgctctgtcttgtgctcactgcagcctccgcctcctgggcttaagtgattcttgtgcatcagccttccaaatagctaggattacaggcatgcaccaccgtgcctgcctgagttgtatttttagtagagatggggcttcaccacgttggccagggtggtcttgaactcctggcctcaagtgatcccatctactttggcctcccaaagtgctgggattacaggcataagtcactgcagctggcctctattagacttttttttttttcttgagacggagtctctttcgtccaggctggagtgcagtgggcgtgatctcggctcaccgcagcctctgccctccgggttcaagcaattctcctgcctcagcctctcgagtagctgggattacagacgcctgccattgtgcctagctaattgttttgtatttttagtacagatggggtttcaccatcttggccaggctggtcttgaactcctgacctcctgatccaccttccttggcctcccaaagtgctgggattacaggcgtgagccactgcgcccagcctgtaagactttttaaaaggatttttctggctgcagggttgaaagtaaagtgcagagtacggtgagaccactttagaagacttagaatattccagacaagaggagatggtgacagagaccagagtttgataggttagatatggggtataagaaaaagtgaggagttaagggtggtctcaagatgttgatctcaagatggtctggctaggtgcggtggctcacgcctgtaatcagcactttggtaggccgagatggactaatcacttgatcctaatagttcgagactagcctgggcaatataatgagaccctgtctctacaaaaaatgcaaagttgggcatggtggcacgtgcctgtgtcccagctactcaggaggctgaggcaggaggatcgcttgagctggggaggacgagactgcagtgagccgtgatagcactactcagctccaacttgggctacaagagtgaaaccctgtctcaaaaatgtttattttgagcatatgacgagatgtgaaaagctacagggataataggcttaagaatgagaataagggagtcctgtgttaattttgagtgtaggtatgtttgaggtctattaaatatccagatgaaaaggttaccgaagcagtttgatgtacaagtcaggagttcatagaaattaaaacaggagatagaaatttggacgcatacaatgtaagggtggctagtttaagccgcgctaccagatgtcctttgtaaggactgtagtgtggttggaaattaggtgctctctgctctaggccacttccaacatttgaaggtcaggagattaaaaggaatcgtctaaggagatgaaaggtaggaaaaccaagagtagtgccctggaagtcaatgacgtgtttcaaggagtgagttatttaactgagtcaaatgctggttcagtaagagtactgagactgggttaataaggtcattggtgacttgacaaagagcgatttccaagagtggtgagggtgaagtgtgattacggtgctttgaagagacagggagaggaagcgaaggcattcttagggagttgcactttatgaagagcagagaagtggagtggaagcttcaaggttagttgagaaacttagtaacattattgtctgagtgcctttatttagtcctattttcacagcaacctgtgagatagacctggcagttaaatcataccaattttatagatgataaaccctaagacattattagtaagttaggtggttccctgcagtttctcatcagtgcttgctcctgtcttttcaaccaagacgctatgactttgcttggcagggtcccaagaaatctaattctggctgtaccataatagatacacctttaattgttgcccttctcaaaaatgtagtgaagattagtgtgtatgtgaatgtaattgtttatagaatgcctgttgcatcatctctttattaagaatagcaaaatattccaaaaaaccttaggaaacggcaattaagtcacttgttaagccgctttatccataaatattttaattgcaatataaggaatagcttttaacaatcagatattaagataatttctgagtttgatttgcatgccccagtttcaaatctttaagtgagatacattgctaagaagaaaatacttagctttttgtagttacttttctgttcgtacatgaaaatgtcttaggaggaaagaaaaaatgagtattatttgggcaaatatatctaagtcattagcctaaatgagtgcttctcaaacttgagcatgcattagcatttccagaaaggcttgatagtctaggcaaaatactttgacatctacttcagcaaaatggcttgctgaagaaaccaagactggcagggatattacattattggcaaaagttacccagatctgaagattagaagcgcttatgtagcaaaacaatataatgaaaaaaaatcccagattttcagtgtgttgcaataaacatgttaaagtgcctcagggctgggcatggtggctcacctctgtaacccagcactttaggacactgaggtgggtggatcccttgagttcaggagtttgagagcagcctggggaacataacaaaactacctcgccacagaaaatacaaaaattagccaggcatggcggcacgcacctgtagtcccagttacttgggaggctgaggtgggagggtggcttgagcttgggaggcggaggttgcagtgaactgagataatggcactgtactcctgcttgggtggcagagtgagaccctgtcttaaaaaaaaaaaaaagtaaaatgcctcacgtaactcattagttacaagtgatactgattgcaaatgtaacttttctagtttgtaaccagaggcttgtctcaagatctatacttagaaaatttgctattctaattattattattattattattattattattattattattatttttttttttttttgagacagaatctcgctctcttgcccaggctagagtgccgtggcacggtctcggctcactgtaacctctgcctcccgtgttcaagcgattcttctgcctcagcctcctgagtagctgggattacaggcacgtgccaccatgcccggctaatttttgtatttttagtagagatggggtttcaccatgttggtcaggctggtctcgaactcttgacctcgtgatccgcccgcctcggcctcccaaagtgctgggattacaggcgtgagccgccccacctgactttttattttttatttattttttttggagacagtctctcagtatctgcccaggctggagtgctcactgcaacctctgcctcccaggttcaagtgattctcatgcctcagcctgtcgagtgactgggattatgggtgtgcaccaccacgccctgctaattttttttttgttttttttgagggactctccctctcacgcaggctggattgcagtggtgtgacctctgctcacttcaagtgattctgcctcctcagcctccccagtagctgggattacaggcagaccccaccacacccgactaattttttgtatttttagtcgggacagggttttgccacgttggccaggctggtctcaaactcctgacctcaggtgatccacccgtcttggcctcccaagtgctgggattacagatgtgagccacctcgcctggctatattctaattcttaatatgaggctgtttcataatctttacttaattcacacttgaaacatccctgatttggataggactactagttactgctaataattgaagtaatcaagattatatggtaaacttgaaagaatgtttattgaatgcttactgtatgttagacatctcgccaagtgttttttatatacagtatttaatcctaaaaacaactctagaagttagctattatataggtgaagtaaactgaggcttagaagttcactgacatgcttaatgtcacagagctagtgaatggcaaaactgggaattggctctacatggcctcactatagaacatttattctttatactaagcagtctttgattaacttggaattattcttaaaaaagacttttatctaatggaaattgttgttgttaggtacataaagaaacaatagatgccgtaccaaatgcaatacctggaagaacagacatagagttggaaatatatggtatggaaggtattccagaaaaagacatggatgaaagacgacgacttcttgaacagaaaacacaaggtaaatattgggataagttttattttatttatttattttttttaatttttttttttttgagacagaggcttactctgtccagccgaggctggagtacagtggtgtgatctgggctctctgcatcttctgcctccggggtttaagtgattgtttgtttgtttttttcttttttgaggtggagtcttgctctgttgccaggctggagtgcagtagcatgatctcggctcattgcactgcaacctctgcttcccaggttcaagccattctcttgacttggcctcctgagtagctggcactacaggcatgcactaccacgcccggctagtttttgtgtttttagtagatacggggttttaccatgttggtcaggctggtctcgaactccagaccctaagtggtgatttgcccacttttgcctcgcaaagtgctgggattacaggcgcaagccaccacacccagctgatttttgtttgtttttgtttttgttttgagatggagtctcactctgttgcccaggctggagtgcagaggtgcgatctcggcttaccacaacctccgcttcccaggttcaagcaattctcctgcctcagccttcggagtagctgggattagaggtgtgtgccaccacacctggctaatttttgtgtttttagtagagacagggtttcaccatgttggtcaggctggtcttgaactcctgacctcgtgatctgcccgcctcggcctcccaaagtgctgggattacagatgtgagtcaccacacctggcctagtttttatattttttagtagaaacggggtttcaccatgttggtcaggctggtctcaaactcctgacctcaagcaatctacctgctgaggcctccctaagtgctgggattacaggtgtgagccaccatctctctccccttgtgataatattcttttttcagcctcacttaagcccagagttagtattttcaattataaatttaatggtagggtagttggagtggctcacacctgtaatcccagcactatgggcaggcagtgcaggaaaattgcttgagcccagaaattgggagaccaacctaggcaatagagaatgacaccctgtctttacaaaaaaaaaatacaaaaattagccgggtgtggtggcacatgcctatagtctaagctgaggtgggaggatctcttgagcccaaggggttgaggcttcagtgagctgtgaattctccagtctgggcaacagagtgagatcctatttagataaatcgattgattgatcacttgatagatagataaaattgaatggtagatgatagatttatttggaatttaaaatttgagctctgtttttgaagacatacttgatttgtatatatgcagtaccatttggatcattccattttcttatattattattcataattgaattccaaatagaattagcaagtgttaaggcatatgaaaatgaaggactcctataatttcagtgctttaggtagctgaggccgtaggatcacttgaggccaaaagttcaagacctcacctttaccccccccccaaaaaaaaaaaaaaaaagcccagtgtggtggcatgtgtctgcagtcccagctacttgggagactgtggcgggaggatcgcttcagcccaggagtttgagagtgcagtgagctgcagtcgtgccactgctgtacagcctgcatcgcagagcaagactttactaaaaatttaaaagaaaaaatactgatttaggataatcattttacctttcataggacagggaaagaacgttaatcttgtttaatatagggcgaaaacacatttgaagaacatagagcagtattaattgaatttttggggaagaaaaatctcatgaagtaattttacccatatatgtatttttaaatattgaatgttgtaaataaactttcttagtttttactctatggaaataattttttttttttaacagaaagtcaaaaaaagaagcaacaagatgattctgatgaatatgatgatgacgactctgcagcctcaacttcatttcagccacagcctgttcaacctcagcaaggttatattcctccaatggcacagccaggactgccaccagtaccaggagcaccaggaatgcctccaggtagcacataggattgcttaaaatctaacatttttaggacattattgatattgtatcgaagtattactttcttccctctaactctttaatatttgttattattttgattgaaattcttgcttgtaggcatacctccattaatgccaggtgttcctcctctgatgccaggaatgccaccagttatgccaggcatgccacctgggtaagaaaattcttttaattgccctgtaggcttgtgcctagtaatgatctttttcaatttggatgttatatgaatgaaatgttactttccattttttgcttctagaaggtatgggctctatatatcttgtctaataaagggatcaaccagtaaatttaaggaatataaatttgcctctgagtaatagatttttgggttttagggtatatgtaagcaaccatctacttcaattgcatttactgtgattaaagtagttggttatttatagatttgcgtttctgagattcagaattatctgtgacactttgtagttgtgacaagaagcagagaaactctgtaaatgatttatttgtcaaagcatcaaaactaaaatgaatatgaggtgcttgtgcccatcacttttacttaaatattgttggatgtgagaggtatacaatacactttcccactgtattttgaaaatcacagttagattttgattttgtcatacattttcacagattgcatcatcagagaaaatacacccagtcattttgcggtgaaaacatgtaagcatctcattcataatgtaattcaggaggtataatcatactgtcatttttttatgtgtgtgtttaatggtatctattcagttgacttcagaaattttctaaccttcctcactaaaacttgcaagctaattaacacaggtctcttaaagaaggaaaataaaacatcttttaggaaacggtaatagacccatataaacatacttcaaatgtgcagtgattttctccaaactattgaaagtaatgggacctgttaataagggttagtatttaagaaagactatattctatgaaattacatgctttattattataggatgtaatggaattttctaatctattaatagaagttaatcttctgataaaaattttaaatcaagaactgaatttacccacaaaaatttaaaaaatttgaaagaaaattgaccaatttatcattttttaagtgaattggacactgatatttgaaggtgagctcttttaggggaaaaaataagtgggttgtgtttttaagtcatggtttagtggtaggtagttattgtaaataggccatctggttttacttttgagtgtctttaattttggtggtagtatttcctttctctaaaaaaaaaaagtgtgtgtgtgtgtgtgtgtgtgtgtatatgtatgtatttgacacagggtctcttactctgtcgcccagactacagtgcagtggcgcagtcacagcttactgcagccttgacctcctgggctcaagtgatcctcccacctcagccctctgagtatctgggactacaggcgcacactactgcacccagctaatgtttaaaatttttgcttttttaaaaagttatggtctcactttttgcccagcctggtttgaactcctgagttcaagcagtccttgagccttggcctctcaaaacttctgggattataggcatgagctgctgcacctagccaaataaaaaatctcatttcacagggtacattcattcaatctttttcttttcaaaatccaacacaactctgaaatagagatttcttctttttctttaatactctgtggatattttccaagtggaaaaagtggtgaatttgctttcccattacacatattttagatgaggcctcttgtacatattgagagtatatttgttctcaaatgactttaaatgttttgtcaacattttttttttattggtaaaccaaagagtttgctgggttttagacaatttattttgataggattgttacagtgtgttgtgtgttctttcagctttgattcatttcagtattagaggtcagattcaagtcttctatctagtgttgtttcaggctttagccagaatattttttaatggtttatgctgttcattaacttactgtttcttgaaatttgctttctaatagaatgatgccaatgggtggaatgatgccacctggaccaggaataccacctctgatgcctggaatgccaccaggtatatgttagataatttcattttaatatgatgtacaggctttatttctaagtttttttagacgtctgtgggcattagtataatgaaatttaaaaatttttgaaagttgcaagttcctgtgagaagtgttatatggacccttttttaaaaaatgtattttggtagatatctcggctcactgcaacctctgcctcacaggttcaggcgattcttctgcctcagcctcctgagtagctgggattacaggcgcctgctaccacacctggctaatttttgtgtatttagtagagacggggttttaccatgttgaccaggttggtcttgaacttctgacctcaggtgatccacccaccttggcctcccaaagtgctgggattacaggtgtgagccaccacgcctggctggccctttcttgaagtttgaaatagatgataggtttcaaagcagccaaagtgagtcacggcctatgtgctgaatctcacatacttagagcgcttgtatttgttaggaatgttttagacaagtaatagagaaatccaacaaacttttttttttttttttttttttttttttgagatggaatctcgctctgtcacccaggctggagcatgatctcggctcactgcaacctctgcttccggggttcaagtgattctcctgcctcagcctcccgagtagctgggagtacaggcgcccactaccacgcctggctcatttttgtatttttagtagagatggggtttcgccatgtcggccagctggtctcaaactcctgacctcaggttatccgcctgccttggcctcccgaagtgctgggattacaggcgtgagccactgtgcccagccccaacaaactgtattaaacggtgtaggcattcattgtctcagtcaacaaaaaagtggtagattcagtggctcaatgatatttattaacccatgctttttttgactttgctcaccttagctttttttcctcagaaatgtcatttggttataagacagctcagacaagaaggggtgtcggttgtagtgcactctccattttcttttcttcttttttttttttgagacagggtgttggtctgatactcgtgctgatgtgccgtggcacgatcatagctcactgcagccgcagcctcccaaagtgctgggattacaggtgtgagtgagcctcagcacctggcctcctttttcttctatttggaaccaaaataactttcccagaagctctttagctccttacgtattatgctgtgagggaacctgggaaattaagtatatagaatttggcctataaagcaggaaatacagcacaaggaaagggatttggttggccagcaagatgtgccacacgaggctattagttgtttttttttcttttttttttttttgagatggagttttgctctgttgcccaggctggagagcagtggtgtgatttcagctcaccacaacatccgcctcctgggttcaagcgattttctcctgcctcagcctcctgagtagctgggattacaggagtgtgccaccccacccgacaaattgttgtatttttaatagagatggggtttcaccatgttggtcaggctggtctcgaactcctgatctcgtgatccatctgcctcggcctcccaaagtgctgggattatagtcgtgagccactgtgcccggccctagcctgcgttttatgttggtgtgtttgcaatccatagcatatttagagtactgaaatgatagttgatgtaaatggacacaggaaaaataaagcatcaacaaactatgaataattgccaggcagttccatatacattatgttgtggtacatatttaggtatttaaaagaatacagaataataattgatgttcatttgagaatgtgaagtcattaaaagttttgtcatgttgaggaagtttaaagtatgtagtagtgatgtgtttaactttggaaaagtttttattgttcatgatatttgattcatcagtttttactgtaatttgcactagggttcagggagtatttaaatatctgtcttgtagctgattgaaataattcttttatatattgcaagaagtttgctaaatcagtaggaccagtaagcataattgccaaatgttttgcccatgcagcagggtctagtgttatcttccacttcgtaaaattctgaagcagtacaaaggaagggaaaatttaaggtaagaatgttgcatggggcaaatgcctaagttccttggatttagtcgagtcattgagcagttaattgttaataactttgtagtatagaagcgtttttttccacactaaatttttcagtgactcaatttccccaaacatttcttctctgcaggtatgcccccacctgttccacgtcctggaattcctccaatgactcaagcacaggctgtttcagcgccaggtattcttaatagaccacctgcaccaacagcaactgtacctgccccacagcctccagttactaagcctcttttccccagtgctggacaggtaaggtgaaaatcctgaaaaggagtgcacttatatttaaagataaagtacagttgtttacagaagtctttgaaattttcataggtcaatttttttgtttataatatttttaatattatttattaaatatactaaaaggtggcttatccacttccatgtttacacactgatttcctctacccataaaaggttgaacggagccaaagttagtatgttactttttcatagctgtgaaccctatttattcttagtttttttttttttttttttaagctaatgaaagtttagtatctggagcgtttagaagttttcctttactgactaaactgaatggaaggacaccaaagtcaaagattagcattcttaagacggtagcaaatcatttgtcaggctctgcctctagtacggaacagtgatgagctacaatgccgcacttgtgctaaaatggcgtaatttaatggcttttgacctaggcacactggtatttcttactggtcttttttcaaagcttttaaaagtcttttttccagagcataagtgaaagatgcttctgttctatatggtatacacatgatggttaacacctttgctttttttcctagtttcattgagaagcagattcagatttaatttattcagaatttagatcgggatgtatgtttattcattttcttttttagattatcccttagatttttttaaattgcttttttctgtttgtgggtgctaaattaaaagcattttctttaagtgccttttgttaagcacattaacctagcttttatggtgggtggaaattttatgtattgagagatgtaaaacttttggcaaaaatcttttgtagagaatcattgatacagaattggattgaagtgtcagtatttgtacatcgttattctcagtttcaggtatcattcttgaaataatgcaaaacagtagttttagaaaagaaactagttaactaggttttattgatttagaattaaaattttgaggctcatactttaattttgtttattgtaaatgcattaactgcctgccttttaaaataagtgacatttgattgcattaaattttgcatttacaaatatgcaatctactaaaaagtctaccacatggcttattttgacccatttgtttggagacttttcattgtttcctttcttttatgctacagatggggacacctgtcacaagctcaagtacagcttcatccaattcagaaagtctgtctgcatcttctaaagctctgtttcctagcacagcacaagtacgcaggaagttgcagtttaaaattgttaaaatggctttataacttaaccctttggaccctacttaaaaaatgaatatttttccaaaaatatactgtgtttacttttttaaagcaaaattaatgctatataagtcaaatggtatttaaaaatttgaattcatactaaacaaaactaccccgaactcctgtggttctaaagggttaaaagcatgtaagcagtaaatgcattatagtggccaatggttagcctgatgcatgattaagctattttgatttaatgctgtttaatgcatcacatttaatgtaagaaaatttaatactgctttggttctaaagttggcctagtctacatgttttagatgtgtggtattatgaaaagtaacatatttgttactgataacttgctactttaaaagatcctgctaaattaactcctttgtccatgataattatccagccattgttaatttggaggggattatatatatatatatatatatatatatatatatatatatatatataaagaatactactaaaggatgtatttttattgtgtcaccatttacactgttcatgttatagttagtaacgagtttaaactcatattctgtagttttttttttagctgtttgatagattaataactaattaatagaacattaaaaatagaacacatgctattctaagatactgtatttcagcaatctggaataaatacaaagcattgtaaatttaatttttggtgaggaggtagaagacatctaacaagttaaatatgcagtcttatttccactgctgtgttgtgggtgtgactttaacctagcatcttttgatatttttatgggttatcttgaattttgtggaatgtttatcacattaactttgtattaatttcatttaaagtttggtcctttatttaatgttgatgccttgttttaagttaaactgttgtagatatagttaatttaaggttttgaagtttcgttgatgaagtattgtattttacaggctcaggcagctgtccaaggacctgttggtacagatttcaaacccttaaatagtacccctgcaacaactacagaacccccaaagcctacattccctgcttatacacagtctacagcttcaacaactagtacaacaaatagtactgcagctaaaccagcggcttcaataacaagtaagcctgctacacttacaacaactagtgcaaccagtaagttgatccatccagatgaggatatatccctggtaagttgcttttagttttctacgagcagcatttgatttaaagccattatagcagttcgtccctttaaaataagtgttcatttgtactcagatggtctgtgatctggtttaatgctcactaagtggtttttgccattctgattcttaagaaatcataaaatacttaaagtggacagatattgcatgttttggtcttagatggtttctctccccttcctccagactgtttctaaaagaagacagtaagtcaggttcttaactctcttaaaaatcattttagttaaacataagtttgcatatgttaattgaataaacgttaagtgtgaagtagaatctgcagatcccttaagtcccatataaatgaatgaattttgatacaaagttaatgtttagaatgttgataatggccaggtgtggtggctcacgcctataattccagcactttgggaggccaagacaggcagatcacttgatcaggagttcaagaccagcctggccaacatggtgaaacctcatccatacaaaaattagcagtgtgtagtggcgggcacctgtaatcccagctactcgggaggctgaggcgggatcatcagttgaacttgggaggcggaggttgcgttgagccaagattgcaccactgcactccagcctgggcaacagagcaagactccatctcaaaaaaaaaaaaagaaaaaaatggaatgttggccgggcgcgcagtggctcacaccggtaatcccagcactttgggaggccgaggcgggtggatcacctgagggtcgggagttcgagaccagcctgaccattgtggagaaaccccatctctcctaaaaatacagaattagccgggcgtggcggtgcatgcctgtaatcccagctactccggaggctgaggcaggagaatttcttgaacccgggaggcggaggttgtggtgagctgagaccaggccattgcactccagcctggacaatgagtgaaaccccgtctcaaaaaaaaaaagaatgttaataacaatacttcattagatagtttcttgttgaagcaatttgtaattcccggaaagttgttagccatgcttcaagtttacaaataggtgaagttttaaggtatctagagtttaagtagttggattggtttgtctggcaaaagtaaatagttgggatgtaagggtaaatttttgaaaattactcttaacgttgtaagattttagatgcatgcctttatgcttggtgagcctctgcattcgagtatttagccctgcgcttatttttattcccaggaagagagaagggcacagttacctaagtatcaacgtaatcttcctcggccaggacaggcccccatcggtaatccaccagttggaccaattggaggtatgatgccaccacagccaggcatcccacagcaacaaggaatgagacccccaatgccacctcatggtattcctctttttatgtttttcatatttagtggattttctaagttcacgcataaaatattaaatttatctgcagcatacgttgcacttaaaagtacaatgcgttaacaatctatttttttgtgtttgaaattcttgattttaggtcagtatggtggtcatcatcaaggcatgccaggataccttcctggtgctatgcccccgtatgggcagggaccgccaatggtgcccccttaccagggtgggcctcctcgacctccgatgggaatgagacctcctgtaatgtcgcaaggtggccgttactgatcttacttcatccagtctaataggtttggagattaaaccttttctcaacttgtgctgtttatatagccaagcttccgtcaataaggcttcattgtgactttaacaaacattatcttcccacataccaggaactattggacatttattttacatgggaaaaattatttggaataataaagcaggaacttttcctgaagttgcaatttatactgtatggcttctttttcatgtttcatctaggtttttagaagtgaagtatagtaaatttggttcgttaaattgtgaaggcgctggaattacatgaacataccaccctagtaaaggcaagttctgtaagcttacattgctatttgtaaagtttgccttcacagcatttcagatgctgttggacttcatgtccccaacctagcttggtgagggctgtaactgtttccaagtacttgtacattggaagtctgaatgtgtaacaatatttaatgtatttagagttcctcatgttgcagggtttaagaaatctgacccaccaaggtcatgtgacttttctgtactgttaaacttcattgtaataaaatgagagaaaaatttatgcctttttattcataacccagctgtggaccactgcctgaaaggtttgtacagatgcatgccacagtagatgtccacataataaaattcatagttaccaatgcagttttgatatatcattggattctgtctttgagttgtaggttatttcttagctgcatgttttaaactgaatttgcatagagttgtatgttaatgtttcagttaagagaaaaacttaagatacatgagtcattacataatgggtatgaaatctttataatcacccttccaccctctatggtgtcagtacacatcacgtgtcatagatacttaaaatgtaaatgttaacacttttccttcctgctgagatgtttagagcctagtgccagacccattcatttccttttgattatttttgagactcagtactgcatggacctcagaagcttttcaggtgcaaacttctagaagcttaggtgcatgcagtaatagcttcttgtgctgttaatgggttattatatattattctaagtgtaatgctgagaatctaaatgtgtctctgttgggatggttaacagatgaattggcaatttttattatgttcctggaagattacattattcatttgagtaccttctgttattaagcctaggtagccttactgtgcaactttttatttatccttggaaattttgaatgttgtgttcttacagagagcttttctgtagagatgactgctattcaatattttgtgttgcaacctcttaaaataatagctcttgttgacctttttgggatctgtttttctgatcttttgcagggtagttttatgattttttaggcatcaaataacctatgcaaagtattaatataatgaactcaagttgagtttttctcattataaagttaagacttctaagaaaatggtaacatttctttataactttcctgtgaaggtatagataaaacacatgaagtctgaagttgtatggaaaaaagggctttaactttgaaggaaaatatattgaaaagtgatttagccatcacaaaagagttcgtatttatgtgacagatgaaagtcatacctttaagcaaaacattgcaagtattataaagctgaatgctattttaactcacattggctgggtgcagtggctcacgcctgtaatcccagccctctggaaggctgagatgggaggattgcttgagtccaggagtttgagaccagcctggccaacatggcaaaaccccatctgtacaaaacatttaaaaattagccaggcgcgttagtgtgtgtctgtggtcccagctgctcaagaggctgaggaaggaggttcttcctccttccgaggctgcggtgagctatgttcactccagcctgggcaacagagcgagactctgtcaaaaaataaattaaaatatctgattatctggcttcaatgattttggctcctgtgcttgtggtaccatagtggtacaaaaattttcatagtttgaaaataaaacaggtattttgccagtaatgtatttctttctgccagcagccaagtcccaaaccactttcccctctgaacctctgcttacctaaatggtttcaaaattaatacatgctgctttgatttggcagcacacttaatatactgctgaaggaaaacttgtgttgaaagtctttaagataaaaatggtgtgataggccgggcgcagtggctcacgcctgtaatcccagcactttgggaggcccaggcgggtggatcatgaggtcaggagatggagaccatcctggctaacacggtgaaaccccgtttctactaaaaatacaaaaaattagctgggcgtagttgcggatgcctgtagtcccaactactctggagaccgaggcaggagaatggcgtgaacccgggaggcatagcttgcagtgagcggagatcacaccactgcactctagcctggacgacagattgagactccgtctcaaaaaaaaaaaatgctgtgattaaatttagaataattaagtaaggggtgctctcccaaattctcaggaatttcatgtatacggttattgacaaactgcaatagggttagtagacctgtttcagaaattatgtgaagctttatttgcattttatgcaaagaaggttgatactttgtagcaaggttttttgctctctgtataggtctgatgggcaaaaatggaacttttaaatatgggatagaattctaattaaaaattaattgaaagtgttaggcattggcagataaaacttaagctcatgagttcctgagtttgtagctataggctcagaggtggtgtacccatttaatatatttgaagtgtaatttttgcatgcatccaaacgtaattaagcttctagaaaataccttttttctaaatgcttctggggtccatagtgtggttgaattatgagtggagcaaattatattcatataattaactctgactcaaccttccttaagtagtagatgaagttgagtcaaagtggatgccaactgccctcacagaagacaacttttgggacttgataattcaggcaggcattgtgattgtcataattaaggaagctgtaaggttagtagggctggcaactttggctctaccttacatccaccccttttagaaaaacaagaaaacattttgtctggcactagtttctgttgtataagttttcatactgtttaacaagaccacagcaggtaaggattaatttttgagtggctgctggaattacttgatttgaatacttagtattttagtagtgtctcacacatttgccattaggtatgaataaaatattcctactgtactcctattccactaagttacattttgaacttagactcaccttaattaaacttaattaattggggagggggattccccaacaaaaagaagtacgggctcagagtggaattgtagtggacaatagttaaaaacaaagctgctccttttgcttgcttgatcattgggatttttaaaaaaaaaaattttaatgcatgtcttttaaattaattgggaactgtttttctaaaattaaaattttcttcttcctatagccctgccataggacaggctgaggctgagtctcagtgttgccctgttcagtctgaggcaagtgggatttattttattccttataggggctttcacagctttatggctgttggatatttatgtccccaaacttgcagcaagtttggtgaaggcccctaaatttaattaaacttaggatttttatactcttttggcagagaaggctctatattaatattcacgtttgactgtggtgttaataaacataagtatttcatatgcaattttatgtaatttgctgtgtgttacataattaacagcttcagtaaagcttgtgttcctatattgaacttcaataaattgacaaaatttgatatttttgattggaggcaagaaatgtttcattcaagttttttactttcacttctaggaaaatcttactggttttattttctccataaactattaaatttaacctcaaggataagtttaatcattggaaatgccactggatactgaaatgtgccttctcttttttgagacggagtttcactcttatcacccaggatggagtgcagtggtgcgatctcggttcactgcaacctctgcctcccggattcaagtgattctcctgcctcagcctcccgagtagctgggattataggctcccgccaccacatctggctattttttcaatatttttcagtagggatggggttttgccgtgttggccaggctggtctcaaactcctgacctcaggtgatccacccatctcagcctcccagagtgctggagtagcaggtgtgagccaccgcgcctggccaaaatctgcattctttttttttttttttttttttttttgagactgtctcgctgtgtcacccaggccagagtgcagtagcacgatctcagctcactacaacctccacctcctggattcaagcgattctcctgtctcagcctcccgagtagctgggactacaggtgcttgccaccacacccggctaattttttgtatttttagtagagacggggtttcaccgtgttagccaggatggtctcgatctcctgactttgcgatccccctgcctcggcctcccaaagtgctgggattacaggcgtgggccaccgcgcttggccaaaatctgcattcttaatcacaaacttacgcattgaatgttaaggctaaaaggtcatctggaaatgcttaattttaaaatattttcaagcctcaccacattagagcaaatgttaatgtagagccctgtaaaggtgggaaggtggtgtctatgtgtgtgcttgtgtatgtgggggtatagaccatatagttgatataacaacagaatttgggtgttacagacctttcagcatggatggattactaattttcaggtatcgaaactgaaatttgatacctgatcctgtggtaaagtatgttaaactatggttttggagtgattattttgaggttcattttcagcctcactgaacagtgttttacgcacatgtgaaaagtatccacatttgtttccaactaaaatttgcttttatttggtgagaaaagttgtgtgcgtgtgtttgttgtagggaataattagggaattggaagagaggccaaaaacaaacctgaattacttttgtttcttgtgtttgagccacgattctatccagatagcagtttactctgagcagtaacaatgaacaagcagtatagcatttagcaaacctggaattgtttgtatatggttttcattcttggaagcataaagaaaaaatatgcattaaatgaattgtaaattttgacttgttaaataacatgtttttcactataactaataggattttaatatttaaagaattttgttgcttccatgacaaaatatcccattggactattttataacctcagtaatcaacatttaagagtccttaattggagatctgttttctctattacctaccatcctgcaatatgctgaaatctttctaagttgcttatcttaattctaatggtgataattgaaaaaagtgtgctggaaatacaggctcttatctggttgagtactgggggtgggaaggatttagtaatgtcataatctgttgaaggtaatatctatagataactaagatagttcctttttttttgtagttctgtgactcagacaaataagattttgagaattatgtagtttttaggtgtctgtaacatccactagtaaaacttggcaaatgaaagaaaattgtgaagtcaccactttaactgagtcaaaattttgtttgaataagctgatgaaaatagacatgtaccctagaagtagatactctaaaattatacagacatgaatgtcttttttaaaaggttgtcattattgacctaatattgagtaatctttctgcgttattccaaattgaaatttgtttgctcttcattgtaacttttatgtaaaagtcctttaaaaggggattcaattataaggctatttgactatagggcagatttttataagtaaacattcccccaattccacttatgctaactgtctcatgacagtaaagtttactcctttttagaaaccctttctcagtattttaatttctgtcattgaatcatttaaataataaccttttgtttttatagcaaagaaatcatctgacttttctgtgtgatgtttcttggcaaaataagcacttgatgtatggtcatgtacataatggatattcattaattttgtgattagtgctgagttttctaaactactatcttaagctcttaggcaccctattatggatctaattcaaaccaatatgtaggaaatggagaaagtaggacttcagtttgcgcttcccaataactttaaatatatccaccttttccaagtgtttaagccctaaaacatctatctttatttttttacctggcatttttgttagaaaatagattacgttttaaagtaacattaaaaaaattcttcagtaagataattgcttttaataagtatatttttcttgctcttggctctatacatttttgcataatattttagtcttgaaaagcttttcattttcttaactctggaaaataatagtttggaactaaattagtttgagaaatctgaatcatctctctttaaatctgttcagttagtctcatgtattctcaggggaaaatgtctttattttactaagcggaagtagtagtcatattgaggcagaaatttgtagcccaaacaaggtaggtcttcgctgaaactaatttgaactattcctatttgaagcaaattgaacactattataaatctagactggctaattagatggaaactttgatggttaggttctttaagaggcatacaatccgttatgagaatgtttatgtttatgttttaatttttatcaaaataacctcagaggaggtacatgtgagtaaactgtcttaatggttgattacttggaacccacccattaattctaaatgatgtaatggtctataaggtagtaatctggcacagcttcagtaatgtgtgctgtgtttgtaaaaaggtgaagtactttattggcattttctaagccctctgacattgttagtgtctgggttggttggtttgcattttactattatggtggaatctgtgttccttcaccattggttaagtctgaggaactaacagtgaaattcattgatggccaacttggataaaaatgaagaatgatattttcccagtttactacacatggaccaatagtgattatttgggagagaacactgggtagtattgtttgacttaagaaccttaaatatattgaaaagtaatggcattcttgctcatgatttgcatttgttagtgaggtctcaccatagtattttaatgtagcttcttattaaaattttattcataaatagtttagcagtcacagaggtgaaaaaaaaaagatttgcaccatcatatccgagtctttactaataaaatgaggctgcttaagtacccaagtggagcaagggaagagttactacagttactgtaagtctgagttagaaaaaatacagagcatctagttattgagcaaagcccccttttacctgttcgcttattcaaagagaaacaatagaatttgcttctcagtacatgtttttaaaattgagaatctctgatgtgacaaaatcaatttttacaaaagttgaattaaaaacttttaaaaattgcttgtctttgggggtatgtctacatattcgtttaaatttagaaattcccacatgtttaagatatatgcccatcccctttttagagtaatcaaaatttctatcacagttcacatactggaatacatagtaaaattgagatgtgtccaagagattttcaatgttaattagctcattctaaatagccaatataaggtaacttctgtttaaaaaaaaaaaaaactagggaaaagttttaaatgtattagtatcaggctctgaggaaatttaatgcacattgactttttaaactatggattgaactcctcagtttaatacaatttgtgtttttgttaactagcagcagaatttcagcatttgctacttactggtagagaagaaaaatcccacagccctgccagtacaggttagtttaatctgtaagtacctgatgttcctatttttttcaaacatatccatataactcacacaaggaagaaagctgtgcggttacttaaatgttagtataactaataatagatccattggacactttaaacactcagtacttgggccaaagtagatctaggtttgctaaccccagttgtaataaaggtgtaatactgctcctttgttatctccttgtggttcaacctaagtagatacattgtacataaaaggaaaagacagtttcagttggctatgcccttgttgatagatgatatggagtccagggctttgggtccagggtcttttacttaagctatttcatggtggttctctcattcaccttttaactttttacattatgaatcaacctaagaaaaaaggcaagtttcctcacatctagaaatgataaatggtgtacagtcataagctagaatatgtttttataatgcttttttgttcttttagcaacacttgtaaatacaagtactcctctatttttgttctttttttgtaaactataacgtatcccgttggtgtaccagtgagttcattttactgtaaactaagaataacatacctttttaatactgaaagttgactactcatcaagaaatgtagctagattctttatgtaacacttttgaggggcagtggggacataatgggttgtggaaaatgtgttttaacatttttattttttttttattctacccgagttcattgttgtttgaaccatcctctaaagatttcctttaacctctaaatgttgtgcttttaggttgataacaaatgtaaagcactgaggagggaggaataaagcatacaagttaatttctaattttcgcaagcctgaaccatcctaatctgatagtaggatgtatggcttcttccttttcaccttgtgtgatgtttaatttgagacgatctagccataaaactagtaatcttgaattcctcttgagctggatggtgattagccattgtgaaaacagattatatggaaattgtgcatattgctaaattttaaaacatggatttatcaactgataataaaatatatcttacaagataaccacttgttttttaatgtaaaattgcacaagggcttaagtttcattgcctttcacagtttaatctgtatatgaaatggtgtagatacagtggaaatggttttccttaaaaccatctctttaaagctgcctttctggtgagtactgttttatacttttatatattataattttatcttctaaaattaactgaaataggacactttgattaaagaggtgagcactctgaatttctacatctttggatattacttgaatcaagaatattagaaaattattttaccacctggcatttcccttttaatttgctagttcacttttttctgaccttcacttaacagactataaatacaaaaactttgaacacataaattatttcattttggtgagatggaataaatgtttaaaattagtatttaagaaagttcttaaacattttttttagttggcagccaaaagatttttcttagtgctttggagacattgcataggtgtaaaattaagataccagaacttcattctgttcttgttgaagctgttgttgtggtgattcatgagcagtaagctggagttagagtggaagaagggtttaccaaaattcttcctgcagactagttgcttacagggtttctttgagaggcttaaaaatttcaaaagtattatttaagccactctaaccctgcatgaaaaattggagttagaaatactgatttctgagaccacgtataccagtgaaaattagcttctgagtaaatttctaatttatgccctgctttatttagcctcgctatatgtaacacatggattattttttccctctagtttttaactatatcctagattaaaaccagcatatgctaagaatgtttttacattctgtttcctcctgtgatctttctgaaccaataataaacagtcaactgtgatgctttttagtatgaacaatgatagttttctaaaatctgaaaatcaatacctgagtatgtgatgtggcaatgcattcttctagataagcactaaacaaagtatggaccctcaatttatgtctttaagatttaaagtgaagtaaatttctaaggaactgtgtcctttcctagcaggaataaacagtgaaaatttggtaagtatttaacttgaagtgcatgtaatagtgatgagagtaagtagccaaatttccgtaatataaggtaatgtttaaaagtgagcaataattattgcatctcttttgcgacttcatgtagatgtgattaacattttttacaaatttgcctgcataaagattaaattggaacataccttactcctttgtctggtttttttattttgtatggtgctttaaatactaattttatatttcaagctttttgcagggtagaaataagtggctgttaaagaaaatatcttcaagaaggattatttcagtgtccctttttaaaactcgatgatggctttcagtttatttaagtcttctgtttttcagctccagttaaaactgacaataggcagctatcaaaaatggaaaaaatcttgtgctctttctggaatattagaggaatcagttaataatagtaaagtggtattaacccaatacttgatttgcagtttttaaagcagtttttaaattgagagaaaaggggctgggcccagctgaggcgggtggatctcctgaggtcaggagtttgagaccagcctggccaacatagtgaaaccccgtctctactaaaaatacaaaaatcagccgggtgtggtgggacgtgcctgtaaccccagctactctggaggctgaggcaggaaaatcgcttgaacccagggggaggaggttgcagtgagccgagatggcgccgttgcactccagcttgggtgacagagcgagactccgtctcaaaaaaaaaaagaaaaaaagaaaaagtgataagatttgggagtctattccctgggatgttctattaataataaagtgataataaatgaaggttaaagtcaagtgttcaattactacaccaggaaagattgattatttctgaggaaaaggtccatttatttccaaactagtctgtagtggtttagagtaagcattattttatgaagtggtacaagattgcaaaggttagtaaagggacctgtctgtcaggtcaatcttcggtcttcacttttactggcaagggattatgtgaagagtaagtcatacaagggatatgattgtaaggaggtcctgaacaaagcatgataaatgttagtccatgtgtattattaaatggtctaaagaaaaatcatgactgatcgcataatttttaatgtaagtaaatgagctcactaagggtaattaaatactagcttttaaaatttaaagttctcacgaatattagtgcatcttgtcactttgatttgtcacctggttaaatagctggaagcttgtgcaaatgaaaaatgaaatggaagactacatttgtatatatatctgtataatttttgtttactagtaggttcagagagagatctgagatgttccttaacatgtagccatgtaattagaactcacaaggggcattgaaatgtttttctttttcagatagtctggggctatttacttattttaagtaagccaagtctaccatttgaaaaatggtgctttatttccatatctgaagcctgaagttattttttagtttgttttcatctaaaagtggaaagatttttgcttctgcgttattaagagcctctttgtttggaggagatggttatctccttcactcattaacctttgagtgcttgttatctacaaagatgaataaaatctttcatttattatttatgatacttgtctgagcccattttttaaatttgtatccagaacagttatatattaataaggtattatgatatgcatcagttgtcctgagcagtttttgttgtatcctgggaactgtaaggaataattattaaatacagaatgtctacggggaaaaggggtaaaagagcacgcttagtgtgcatattttgtatgtgatagttgggtaggtagatgagccagaagaaacagtgatttagagtgagcataaaactagatcttgcaaccaaatccttgcttttctattatttattagttatatgacctggaacaaattacttttcaaatggtagttataagtttcataggtttgtgagaaacaagtaaatatgtgtagaagaatttggcctggcaactttgtaagtgctcagtattttctgtatgtttacttgaaagaactaacacactatacatttgtgctaaccttgttagaccacaggcaatggtgggagcagacagttattgcaaatcaaaaaatttcatttagcacatatatatgaatgcccacagtgtgctttgatattatcctttgtacatagtagagaggaagtgcatctgagtagagactttggaactgaggatttaagaagccagcctttgcacaaagtctcattgagtaacagtgttttgggtagtaggtgtgcagaaaccatgagatgggaaacataacatcttgaacaaaaaatgaggtttgaatggtgggtgggatgggtgcgtgtgcatgtaaggtgagtggagatgggagagagagagaggccaagtctcacaatggaccatggtttgaatgtcattctaatggaaatcttttgaagaacttggagctggtgagtaatacatggtttatgattaacagattatcctaagttggttggcagtggggcagggtgggttggtgggcagtatgaggatcagttagaaggcaagaagaacctggccccaaacatctcaagagtaactgatgtaatgacttactgaatagtcatgggagaagttagaagatgctaaccttgaatgtgtgaaacacaggaaaaggcaaaaagcaaaatattgatgctgggtacagtgacttatgcctgtaaactcagcaactgaggctgagttgggaggattgcgtcaggccatgagttcaaggctgcagtgaaccatgatggtgccactgcactcgctggtgcccgggcaacagtgagacccccaactcaaaaaggaaacattggaaatacagtgggttggtttgggggattttttgtttttttttgtttttgttatttatttgtttggacgctgtttaggctccacctaatctgtaagacttatttaggaaatgtttgttggagatcgagtaagacattgagaggcaaaaaataagtttcttcaagagtctaagaaggatacatcagtaacaaagtgaaaatgccctcaaaggacgtaaaatttggagaaagcaaattccatctatgtgatctcaggatggtggcatttgaagtaggtcttggattgttaggatttgggcaaattggaaaaaaacgtgttagaaaagagatgggaaaacccaacagtatgaggcttatgaaggaaagttctaaagaatgaggtcattggagtctaaagtgtaaagttccttgaataccacattaggcatatacattttctctaggagttggggtgtcttgggattcttggcataaaaacaacattaactgcctgggtgtggtggctcacacctgtaatcccagcactttaagaggcttaggtgggcagattacaaggtcaggagttcagaaccagcctggccaacgtggtgaaaccctgtctctactaaaaatacaaaagttagccgggcgtggtggcaggtgcctgtaatcccagctactcgggaggctgaggcaggagaatcgcttgaacccggaaggcagaggttgcagtgacccaaggtcgtgccactgcactccagcctggacaaggagtgggactccgtctcaaaaaacaacaacaaaaaaacatcgactagagcagtggctgtggttttggacccagtgtgtcttcagaagcacccagggtatcattataggctgccactatttcctggtaccacaggatatttccatatcactaccatctgggtgacagggaataataaaatttagaaactgtaactgggccggacagctattgacttggtgagttgaaactagaactatcttatgttcagtaaggccagtttaaagtgttttggaagccttatatatctgaggccattgtacttcttggtcactttacaaactaagtttcttaattttttactattccccacaattataggacattgttctgctcagaaacctttgttatcaccacataacttgtattttgtagtaacagaacacccctctttctgaattcttcatggaactttcctgaaagctggttctgagtctctaccaatgtatattcatacattgtgcatgtattataaccatgtacaatggaagtgagcaatgtgtaaccatatgtctcagtatttgctaggatcatgatgctatgaagcaattgatagtcacccttttcacttattccccttgctattccacatcactgcttttcctcatccgtcgatgccataaacagtttgtctgatggctttctgattcatgaagatggtaaaagccaaggccctcaacctaccatatctataaaatctgtatttgcatccttttttattacattgtactaggcatccattaacagctctcctcttttgctatgctctggaatccaacttttgccattgtagtggtctccttgttcgttcttgtgtttcttcagcttcctatcctgtttttgtttttgtttctgtttttttttttttttttttttttttgggggaggcccaggctggagtgcagtggcgcaatttcggctcactgccacctccgcctcccgagtccaaacggttctcctgcctcaggctctcgagtagctgggactacaggtgtgtgccatcacacctggctaattttttgtatgtttagtagagacagggtttcaccgtgttagccaggagggtctcgatctcctgaccctgagatccacccgcctcggcctaccaaagtgctgggattacaggcgtgagccaccgcatccggcccgtttctcattctgttaatgactcctttttcctaggataaaatttggataaaataggagtcaagactgaggctcaggttttacctctgaaaactcttggctcaaagacccttaataatctgactcctgcttatctttccaaaataatttcttgccgttctcccttggtacttggcttaaactctcaacaccctctctgccccttagtactttgacttgtgtaacttccacttcctcacatctgccaaatactagtttagagttaattccctcttacaaatccctgatcctctgtgatgaccttcgtatgtgctttcattgcattatgtacttaccatcaatttgtgtgtttatactggactgcaacctcggacgcaggactgtgtcttgttcatttcattcctaaaacttagcacgttgcacgacacttaaaaagaggcgcttagtaattgctgggttaaattgagttgctagtaatggatttattattattattattattattattattattattattattattattattattattattttgaaatggagtcttgctgtcacccaggctggagtgcagtggcgcaatctcggctcaccacaacctccacctcccaggttaaagcgattctcctgcctcagtctcttcagtagctgggattacaggtgcacaccaccacatctggctaatttttatattgtttgtttgtttttgagatggagtctcaccctgttgcccaggctagagtgcagtggcgcagtctcggctcactgcaacctccacgtcctgggttcaagcgattctcctgccccagcctcccgagtagctgggattataggtaaaccccaccatgctgggctaatttttgtaattttttagtagagacggggtttcaccatgttggtcaggctggtctcgaactcctgacctcatgatctgcccacctcggcctcccaaagtgctgggattataggcatgagccaccatgcctggcagggttaatttatttcatcaaaacagactaaaggtttagagagatgtgcctttatttgaatattgtgcagtttaaacctgactcagtcatgctgtccttttgagcaggatctttagaacagatacttgtgattggctaaagaataacctctgacaatagcaaaggtctcttggacagagctgttaaaacaaaacaatgaaatctgtatttgtttaagattagaaggatttttgaaaagtaacttttcctgcggcatgtctgctagaataaaaggttctcgttttattaatggcgaaagaatagctttagtttggaatagaggtaggctagaccagtgattgcaaactgaaacacctacgagaaccagataggttatagaaatgagtgaaacaagccaattggggagtggggaactcgtgacccttacaaatgaggctcatgctgggtgcattgcctggccacagtggccagctttcagtttttttctagagaagttagatctcatagttatttaaagagaatttaaacactgtgctaatcacacctgcaggacagtttttcttgtagatcaccagtgtgggattttttttgatgaaagctgatgtttgcagaaatttatatcaacaggaggaaagcaagataatcccagagaggaaggtttgatgatggacaagaggtagatgatggagtatgatgttggggaacaagccactgaatagactggtgcagttgaaccagtaattggctattgtgatcgagctgcaggttgtcggtgtatataattatataaattagtgtttggcatcaatatttcagttcctagatgggcttttgggaaatgcagtatcccaagggactgagatcacaaaagtaaaatttcagaacaatcaatgaacatttttggatggggagggacctatcttgaatatagtcataataggtgactaagtttattactgtggggtttgaaagaggttattttacctatgattcatagtgcttggcacctagtaggcagtaagtgtttgttacattgagtaagtatatctctgtgatgccatcctcaaatcaaagaaagctatgtctgatagctgtcagggtgttggcaaagcatactttagtcctcagtttctcagtaaatagtggtgagacaaaaaggtaaaatatttaactccagtagttcataattaccaagagtatataatcttttacctgctttctggaaatttgtacaaagtccatactgttccttttcttaaaagtacgttttctttatgtttaaagtgttgcatgttacttttaaaaatctaaggccaggcgtggtggctcattcctgtaatcccagcactttgggaggccgaggcaggtggatgacttgaggtcaggagtccaagaccagcctgaccaacatggtgaaaccccatctttactaaaaaaatacaaaaattagccgggcatggtggtgcgtacctggtcccagctagtgcagaggctgaagtgggagaatctctttgagcccagatcgctccactgcactctagcctgggtgacagagtgagactcttgtctcaaaataaatataaataaaaatctaatgtggattaaacgaaagaaattgttttctgctctactcccggctacagtccccaggaagaactagatttgtcccttgttatctgaagactggttccaggacttccctttgatactaaaatctgcagattctcaagtccctgatatgaaaatgacatagtatgtggatattacctatgcacatcctcccatatactttaaatcatctctaaattacctacaatttttttttttttttttttaatgagacagggtctcacacccatcatccaggcccaggccggagtgcagtggcctattcacagctcactgtggccttgacttcccagctcagatgatccacgtcagccgcctgaggagctgaaattacaggcacacaccaccatgcctggctaattttttgtatttttagtaaaaatgagatttcgccatggtgccaaggctggtctcgaactcctgggcttaagtgatctgccagcctcagcctcccaaagttctgggattataggtgtcagccaccgcatccagccctgtaatacttttttttttttttttttcccagacagtgtcttgctctgtctccaggctggagtgcagtcacgcgatctcggctcactgcaacctacatctcccaggttcaagcggttctcctgccttagtctcccacgtagctgggaacacaggcacgtgccaccacgcttggctaatttttgtatttttagttgagatggggtttcaccatgttggccaggatggtcttgatctcttgacttcgtgatccgcctgccgcggcctctcaaagtgctgggattacacgcatgaaccactgcacccggcctaatacaatgtaatttataagatagactgataccaacagctaataaataatagaacagttataacaacatactgtaataaaagttatgtgaatgtggtctctctttctctctgaaaatatgatactgtactcatctgttttcagactgcagctgaccatgggtaactgaaaccatggaaagccaaatctcagataagggagaactactgtacagacacttttttattgacctcatctaggcagcctcagttttgttttgtttgctttttgagatggagtctccctctgtcccccaggatggagtgcagtggcatgatcttggctcactgtaacctccacctcccgggttcaaacgattctcctgcctcggcctcctgagcatctgggattacaggaagtttatttctatctttatccagattgctggttttgcaatgcctctttgcacaagactttctctggctcactttgttatgttccctctagaatgaggctctggtaagaaacatccctgtttgctaccctagtagtggaaaaaccctagtcctggaaacccaagacacctgaattggttcttcccagctccccctcaagagagggagacacttttagcttgtattttggtttacgggttaaaagttttatattaggatcagaatgattgcatctggtttgaagactgaaatttctttggacagggtcttgctctgtcacccaggctggagtgcagtggtgtgatcacagctcaccgcagccttgacctcctggactcaagcaatcctctctcagcctcccagagtgctgggattacaggtgtgagccatacacctgggcctaagagttgaatttttaaaacctacttaaaattactgtctttgtaaaaccgtatgaaattagaaccagaagttgccttaaagatctagtctaatcagtctaatctcattttgtagggagaagatttgcttgtaatacctgtaggatatggcaaagtagaacatgtaaccctggccacattggctcatatatgtgatcccagcactttgggaggccgaggcaggcggattgcttgagcccaggagtttgagaccagcctggccaacatggcaaaaccccatctctaaaaaaaaaaaaaaaaaattaaaaatgagcaaggcatggtggtgcgcaactgtagtcccaggtacttgagaggctgaggtgggaggatcatcttaaccccggggagatggaggctaaaatgagctgtgttcacaccactgtaccccagcctgggcaacagaataagacgctgtttcaaacaaaaatgtgtaactcaaaaacagcaaaatgcttagttctttgtaaatgcaacattttaggctactgtttatttgccaatagaacttttttttctctctctctccttatttgtaaacttagctatatatgtttcttactctttggtcttgtttacttcaaaatctttttagaagttgaggagattgggaggcccaggcaggtggatggcttgagctcaggagtttgaaaccagcttgggcaacatggcgaaactccatctctacaaaaaaaatacaaaaattagctgggcatgatggtgtgcatctgtagttccagcttcttgggaggctgggatgagaggatcacttaagcctgggaggtcgaggctgtagtgagctgagatcacaccactgaacttcagcctgggcgacagagtgagacagccaaaatagggggaaaaaaaaaaggtggaggacagaggcatcctaaggtgatgggacatttttcttttaattttaattttaatttttttttttttgagacggagtctcattctgtcacccaggctggagtgcagaggtgcgatctcgactcactgcaacctccgcctcccgggttcaagcaattctctgcctcagcctctcgagtagctgggattacaggcgcccaccaccaagtccggctacttttttgtatttttagtagagacggggtttcaccatcttggccaggctggtcttgaactcctgacattgtgatccacccgcctcaccctcccgaagtgctgggattacaggcatgagccatcgtgactggcttaatttttatttttttttactcatgtacatgaatcaatttttatttctttttactgaagtgacatttttcatctttatactgcggatttgtaattcagatttctaaaatattttaatcatcaaagacaattgtttcttttttttaatttttttttgagacgaagtctcactctgttgcccaagttggagtgcagtggcatgatcttggctcattgcaacctccacctccccggttcaagtgattctcctgtctcagcctcctgagtaactggaactacaggcgtgtgccaccatgcccagcaaatgtttatatttttagtagagacggggtttcactatgttggccaggctggtcttgaactcctggcctcgtgatccatctgcctcagcctcccacagtgctgggattacaggcatgagccactgtgcccggccaaagacaattattattaatttatgtatttatgtatttatttatttatttatttatttattttgagacagagtcttgctctgttgcccaggcgggagtgcagtggcgcaatttcggctcactgcaagctctgcctcccgggttcacactattgtcccggctcagcctacagaatagctgggactacaggcacctgccaccacgcccagctgattttttgtatttttagtagagacggggtttcatcgtgttagccaggatggtctcgatctcctgacctcgtgatctgcctgcctcagccttccaaagtgctgggattacaggcgtgagccaccatgcccggcccaaagacaactattaatcccatttcatcttagaactttttcttaaattttcatgcattagggttttctcaagaatgtactgtcctcctgaaaactcttatttgcctatatattatactttacatcttcaactcatttactaataagttgttagatttaacccaatgtcttccttgtaatttccttctctccagcacaactagtgtacttatgttttcttgatgttaatgaagattggtaaagggtacccggtacaattttaaaaatttaagtgaacccagctgatatatttgccttaattttattgctgacagactacatctaaatatgtgaaagaaaaaaagtgatactcataacttcagaggtttgaaatgtattgaagattgtgttcatttaagtttaattgttccagtttactcactggaacacctgtaatcccagcactttgggaggccgaggtgggtggatcaccttaggtcaggagttcaagaccagcttggccaacaacatggtgaaaccccacctctactaaaaatacaaaaaaaaaaaaattagctgggcgtgttcgtgcacacctgtaatcccagctactcgggaggctgaggcacaagaatcgcttgaaccggggaggcgaaggttgcggtgagccaagatcacgccgctgcactccagcctgggtgaacagagtgagactgtctttttttgttttgttttgttatggagtctcagtctgttgccaggctggagtacagtggcgcaatcttggttcattgcaacctccgactccctggttcaagcgattctcctgcctcagcctcccaagtagctgggattacgggcatgcgccaccgctcccagctaatttttatatatatatattattaatagagacggagtttcaccattttggccaggatggtctcgatctcctgaccccgtgatctgccctgtcagcctctcaaagtgctgggattacaggcatgagccacctcacctggcatgagactctctcttaaaaaaaaaaaaaaaagaaaaaaaaattgctctgggcgaggtggctcacgcctgtaatcccagcactttgggaggctgaggccgaaggattacctgaggtcaggagttcaagaccagcctggccaacatggtgaaacctcatgttgtctctactaaaaatacaaaaattagctgggtgtgggggcaggcgcctgtaatccccggtactctggaggctgagccaggagaatcgcttgaacccggaggcagaggttgcagtgatccaagatcgtaccactgcactccagcatggggaacagagcgataatctgtctgaaaaaaaaaaatggaataatacaaaattatactaagattcattcatgttattttttgtggctgcagtgcattcatttccactatatagtatttcattgtctgatgtaccagaatttatccactctctttttgatgcatgtttggatttgcagtcttttgctttatgaaaagtgctgctgtaaaaattattattatctgtctcctgatgcatatgtgaaagggtttttctaggagtgaaattgctggataatatgtaaataataaacataagaaaatgtcaaattcttttccaaagtagttaatcaagttatactccaccagcagtgtataaggagttctcattgatccatatcttctccaacatttaggtttctcacagttttacatttttttgccagtgaaatgtacataaaatgtatcttatggtttaatctttgtttttttttaactcagtctttctgcttttattctttattctctattgaaaataatttggtttagatttagacttagattgataaaattaaaaaaaaaaagaatttgggctgggtgtgttggctcactcctgtcatctcagcactgggggagactcagatgggtgcatcacttgagctcaggagttcaagaccagcctgggcaacatggtgaaaacccatctttattaaaaaatacaaaaaaattagcgtagcatggtggttcatgcccatggtcccagctatgggggaggctgaggtgggaggatggcttcagcccagaaggtcaaggttgcagtgagccaagattgtaccactgcactccagcctgggcaaaacagccagaccctgtctcaaaaaaaaaagttattttttttttgttgttctgattacaaaattagcacaaatatattcattttcaaccaatattatgggctataacatgtttcagggtcctagggaaatacattaggtaaacaaaacagacgagcccttcccctcatagagcttccattctagttttggagattaacattaaacaaagaaaataacttaatttcagatactgataaagtgccatgaagacaaaaaaacagagtaaaataatagtggttggtggagttgggactcctttaggttagaggaaggcctttctgaggaattgaatgatgtgtgagctgtatctaagtgatcgaaaggagccagccatgtggagaaggcacaggacgagtgtcttaggcagtaggagcaggaattctaaaggtcaagagatggggaacaaactggtcaaaattaaagaataagaagaaagcaaggcaggcacactggagcatgcctgtaatcccagttacttgggaggcagaggtgggaggatcacttaagcccaggagtcaagaccagtctgggcaacatagcaagatcccatgtcagaggaaaaaaatgtgtataaaagaaagcaggccaggcgcggtggctcacgcctgtaattccagcagcttgggaggccggggcaggcaggtcacctgaggtcaggagttggagaccagcctgaccaacatggagaaaccccatctctaatacaaagttagccaggcatgttggtgcatgcctgtaatcccagctactcgggaagctgaggcaggagaatcgcttgaacccaggaggcagaggttgcagtgagcctagatcacgccattgcactccagcctgggaaacgagcgaaaactccatctcaaaaaaaaaaaaaaaaaatcagaactcacccttaatccaaccatccagagataagcatattaacatttttttttgtttatttgttttttgagatggagttttgctcttgttgcccaggctggagtgcaatggtgcaatctcggctcaccacaacctccgcctcccgggttcaagcgattcctctgcctcagcctcccaagtagctgggactacaggtgcacaccaccatgcctggcgaatgttttgtatttttagtagagtcggggtttcactgtgttggccaggatggtctcaatctcttgacttcatgatccgcccgccttgacctcccaaagtgctgggattacaggtgtgagccactgtgcccggccaccatgtaaacattttgatgcaagttctttttttttttttttttttttttttttttttttttttttctgaaatgggattcttgctctgttgcccaggctagagttgcgatggtgtgatctgagctcactgcaacctccacctctcagggtcaagcaatcctcctgagtagctgggattacaggtgcgcagccacgctcagctaatttttgtattcttaatagagacggggtttcaccatgttagccaggctagtttccaactccttacctcatgattggtccacctcagcctcccaaaatgctgggattacaggcgcgagccaccatacccagccactgacaagttcttgcacacgtttctctatgcgtctttggtatttccccctattttctggtgagttaaatggtagggtgtctttttattttattcatggttacttttttgtagtaatattaaataatattacgtgaatgttgtatgaaagtttattgtggctttattcatgaattgtaacatttaccttctgctttgtagccacaattactattattatgcttatttttctttacaagtctaaatattaactgttagtcctttcacctcacaaattccaaatcaaaagtatttttttcttattaaataaagaagttggttgcctggatgatatcttcaggtatatttttcttacgtttatgtaaaatacatagaacaaaatttaccatcttaatcatttttttaaaatttatttatttattttttcgagacggagtcttgctctgtcgccaaggctggagtgcagtggcgcaatcttgactcaccacaacctccgcctcctgggttcaagcgattctcctgcctcagcctcctgagtagctgagattacaagcgcccaccatcacgcccagctaatttttatatttttagtagagacagggtttcgccagactggtctcgaactgctgacctcaggtgatctgcccattccagtgaatccacagaaaattttaggatgctggcaggcaagtgattgaaattttgtgaagtcttttcttttatctttcttttattttttgtatgtggcaagagcttctgagaaattcatttcctctatcagaatttggctcttccttgcttccacgactctgctatttatttgcccctgttataatacatatatagtaaagggagtaaaacaaatttaaaataaaaaacgtattaaattataaaatatattcctatttttataaaatgtagaaaggatatatgacttctgattgagatgttaaagtgagctcaacttcaacacaattcctctgcctcaaacacgtagcaataaataaatgttgaaaaaggaaaaacatatgactaaaaatagaagagaggccaggcacgttggctcacacctgtaatcctagcaccttgggaggctgaggcaggtggatcacctgaggtcaagggtttgagaccagcctggccaacatggcaaaaccttgtctctactaaaaattagctgggtgtagtggcatatacctgtaatcccagctactcgggaggctgaggcaagagaatcgcttgaacccatgaggcggaggttgcagtgagccgcgattgtgccactgcaccagagcctgggcgacagggtgagactcaatctcaaaaaaaaaaaaaaaaaaaaaaaaaaaaagagaaagctctagtggcatgtgaggctcacagtgagactccggctctgagtggagaatcagtgtttgctgggactttgacctctttctgtaaaacagatccttaggagaactccatggcagagatgcctggagctgggagtatccctcaaagccagggcctgggatgggcattagcttgtgaaagcaggctgataaaagggttgactgtctgtctgggactgttgctttgtaagaaagtgggcctagtgagggcaagggagaaaaacatgactttttgaccaaaaacagcaaagtagcctgtctgctcaagtgactgaatctgtaatattagtgtatcagcacagaagatttgaaacactatgaagccctagatcttaattgaaggctctggaggaacaggtggagccaactgcacatcttctagataaagtagagtaagagaaagaaaagggagagatttaaaaagtaagaaggtggccgggcatggtggctcacgcctgtaatcccagcactttgggaggcttgaggtgggcggatcacaaggtcaggagatcaagaccatcctggctaacacagtgaaactccatctcttactaaaaatacaaaaatttagccgggcgtggtggcgcctgtagtcccagctacttgggaggctgaggcaggagaatggcatgaacccaggaggcggagcttgcagtgagccgagatcatgccactgcactccaacctgggtgacagagcgagactccatctcaaaaaaaaaaaaaaaagacaaaaccttaacttttcattcaaagacactaaaaaacttaagaaaggaatgacagatcacatttgagaagataatcactgaacatctagatttcagaccgggacggtggctcacacctgtaatcccagcactttgggaggtcgaggcgggtggattgcttgtgcccaggagtttgagaccagcctgggcaacatgacgaaaccctatctctacaaaaaattagcaggatattgtggtgcttgcctgtagtcccagctatccaaaaggctgaggtgggaggatcacataagcctggtggttgaagctgcagtgagccaagattgcaccactgcactccagcctgtgtgacacagtgagaccctgtctcaaaaaaaaaaaaaaaaaaaaaaattattcaaggttatgcctctacaagaagaaaagttaatccagaaggaaagtgtgggcatcaagaagcaaaaggtagtttctatagtgggaggagtggttgacttaaagtaatgtgaccataggaattaatttaacaggtcagtaagtttaaattatttattgactctaaacccttttttgtgatggaaggccaaaataattttttttttttttgagacagggtctcactctgcaatggcatgatcatggctcactgcagcctcaacctctggggcttgagtgatcctcctgcctcagcctcctgagtaactgggactacaggcatgctgcaccacacctggctaattttgttttattttttctttttggtagaaatggggttttgccatgttgctcaggctggtctcgaactcctggcctcaagcaatcctcctgctttggcctctcaaagtgctgggtttagaggtgtgagccactatccctggcctgaaatgatttttttttttttggagacaggttctcactctcacccaagctggcatgcagtggcacgatattggctcactgcaacctctgcctcctgggttcaagtgattatcctacctcagcctctcaagtagctggaattacaggcatgcacaaccacatctggctaatttttgtatttttagtagagacggggtctcaccatgttggccaagctggtcttgaactcctgacctcaaatgatccatctgacttggccttctaaagtgctgggattacaggtgtgaaccactatgcctggccccaaaataaaaatttatttatttttgtttttgtttttcccaaaataaaaatttaaatcaagacaaaaatgtaacgagtggcgttatttgtacatttttgcagatctctttaatgtttgtcttaatagaagtcagctagattctcatatatgcttctgtgttcagtatgttgcagtgttttctgggttgaagtacccaaagaaaatccaacctcacacagacaagtagttgggaaagggattattttaatcgctttttcacttgaaagcttaaatgttttctgttacaacaaatactgagttgtttttcttgaagtgacagggttacttcatttttgaggaaatgtctgccacatacccacatctgtagatccgtggttgtctatcagttcttgcaaataaaaatggtgctccctgagaaaagtagctagttcagcccaactcaaagaattgcacaaatgtctttccatgagacaactcttgtacttctgtgtgtggaagtgttttatgcatgcttcccatgttatcactcacagtttttaaaagatgtgtattcatgggtcaaggatttataaaattaacaatttttattctgtcatctggggcaatcttaagtgaaactggctttttctgtgagtgcatgatgaagaatacagtgactactgggacagtttgataacactgcctagattcatactaagacaccagctcttttacccatcatcagttttgtaccattaatgcaaatgtcaatcaattgagaacaatttgtagtattattataaaaatagctttaacctttcagacccttgaaagggccttggggaacatactctgagaagtgctgccctaaatagtaatagagaggatctgtccaatggtgtgctaagaatctcttcacattccccaggaagagagacatagctgcagacatttagagtagacataaagttaagtgtgttgctttaaaatcaagagtaactactaaaaaaaacccagacacatctatagttttcaaattagcacggctaaaaaaagggaatacagaaatcaattcaatagaagaaaggaagagactcagaaaaagggataacatcttgtgtgtgatggctcatgcctataatcccagctgaggtaggaggacctgggcaacacatagtgagaccctgtctctacaaaaaatataaaaaattaaccagatgtgctggtgtacacctaaagtcccagctgcttgggaggctgagatgggaggtttgcttgagcccaggagattgaagctgcagtgagctgcgattgtgccagtacattccagcctggatgacagagaccttgtctctttttaatgaaacaatgggcaaaagaagttcaagaaaggaaattagaaaccaatctcatgagtataaaaaaaaaaaaaaaggaagagaagtaaaattcttacaaatttggcagtgtactaaaataatgtatgaggctgggtgcagtgactcacacctgtaatcccagcactttgggaggccaaggcaggtgggtcttctgaggtctggagttcgatatcagcctggccaacatgagaaaaccccgtctctactaaaaatacaaaaaattggctgggcataatcccagctactcgggaggctgaagcaggacaatcgcttgaacccaggaggtggaggttgcagtgagccgagatcgtgccattgcacttcaacctgggcaataagagtgaaactgtcccaaaatacataaataataaaataatatacaatagacaaggaggatttattctggaatgcaataatttctttttttttttttagggacagagtcttgctctattgcccaggctggaatgcagtggcaaggcctttgcttactgcagtctcaacctcctgggctcaagctatcctcccactacctcagcctctccaggagctgggactacaggcacataccacccactaacaattatcacctggctaattattgaatttttgtataattttttgtagagacaaggtctcactttgttaaccaggctggtcttgaattcctggactaaagtgatcctcttgccttggcttctcaaagtgttgggattataggcatgaaccactgcacccagtccaagaatttaattctttgaaaatatttacacttttttgctcaaaattctcctatggcaaaaatacagagttctgccctgagggcctttgcacctctggttccttcagcctagcatggactttctttttttttcagagacagactctcattctgtcacccaggctggagtgcagtggtgtagtcacagctcattgcagccttgaactcctagactcaagtgatcctccttcctcaccctcccaaattgctgggattacacacatgaaccaccattcctgaccttgtactttgttttttttttttttggagtctcgctctgtcacccaggctggagtgcagtggtgcgatctcagctcacttgcaacctccacctcctgggttcaaacagttctcctgccttagcctcccaaatagctgggactacaggcgtgcaccaccacgtctggttaatttttgtatttttagtggagacaaggtttcactgtattggccaggctggtctccaactcgtgacctcaggtgatccacccacctcagcctcccaaagtgctgggattacaggagtgagccactgagcctggcctatctatctatctatctatctatctatctatctatctatctatctatttatttttgagatggagtctcactctgtcacccaggctggagtgcagtggtgtgatctcagctcactgtgatttccacctcctggattcaagcaattctcctccctcagcctcccaagtagctgggactacaggtgtgcactaccatgcctggttaatttttgtatttttagtagagacagggtttcactatgttggccagactggtctcgaactcctgacctcaggtgattcacccacctcagcctcccaaagtgctgggattacaggcgtgagccaccacgcccaacccttatacatcttttattgcaaacttagttataaacaaagtagaagtatttatttttattttattttgagatagagtttcactcttgttgctcaggctggagtgcaatagcgtgatcttggctcacggcaacctctgcctcctgggttcaagtgattcttctgcctcagcctcctgagcagctggtattacaggtgcccaccacaacacccagctaattttttgtatttttagtagagatggggtttcaccatgttgactaggctggtcttgaactcctgacctcaggtaatccactggcctcagcctcccaaagtgctggaattataggcgtgagccaccacaccaggcctatttatttatttatttattttgagatggtgtctcaatcttttgcccaggctggagtgcagtggcatgatcttgtctcactacaacctctgcctcccaggttcaagcgattctcctgcctcagcctcctgagtagctgggactacaggcatgcacccccgtgcctggctaatttttgtgtttttagtagagactacgttggccaggctggcctcgaactcctgacctcatgatccacccaccttggcctccctaagtgttgggattacaggtgtgagtcaccgcgcccagtcaatatttatttatttatttacttacttacttaacatagagacaggatcttgctctgtcatccaggctagagtgcagtgatgccatcccatcatagctcactgcagcctcaaactcctgaactcaagtaatcctcctgcctcagcctccccagtagctgggactacaggcgtgtgccaccatgcctaagttttaaatttttttgtagagacgggggtctcaccttgttgcccaggctggtctcacactcctgggttcaaacaatccttccatctcagccttccaaagtgcctggattacagatgtgagccaccgcgcccggcctactcaaagtcctatctgggaaaatgctatctggtggtaatgtgtaattttcaatttttaaaaaaaattggttctgtaatagtcttttaggcccttcccctttgtataaagatgtatttataagtaaatgaattatgaaattggttcatttccatctttttaaaaggtagtcaaaaataattgtcagatgcaatgagatattggatgagctgcataggtaagatataagcagtgtacaaagtgggataaaaatgccactttacatactttttttttttttttgagacagagttttattcttattgcccaggatgaagtgcagtggcgcgatctcagctcactgcaacttccaccttccagtttcaagcaattcttctgccctagcctcttgagtagctgggattacaggcatgtgccaccatgcctggctaattttttttgtatttttattggagacggggtttcaccatgttggccaggctgtctggagctcctgacttcaggtgatctgccgacttcgacctcccaaaatactgggattataggcgtgagccaccacacccagtccacttttcatactttctaaaacaatatttagggatttttgtgttagccactctcctatctcatttctccaattgaagtaatgcataaatcttccattctcttttttctctcattcatggatagaatgaatgtctataatgaaaagagcttcttatcaatagccctctcagatttgttctgaattttgccaaatatttgtataactctgcaaaagactttctttccctgccttctcctttagagggaaaaacaaactgtaggtgtgacagcttacctcctagcattgttgtgaggtttggctggcacaagataaagtgctgtgtaattactctgaaatgtttgtaattaataaagaaatgaattgtaggcactttgtcagtagaaaccactgtgatttggaaacgcaatgtttcaataataaagactataaaatttaaaaaagaaaaaaattaattctctccaaattataaattaaatggtatacctaatgactttccttagaacttgaaaagcttaacccaaaatttatatgaaaaggcaagagcctggaatggttaagacaacgttaaagaagaagaagaatgtgagacttacccttatagagaccgcaattaaccataaagccatagatgttctcaagcctagtatagcgcctgacacacagtagttaatgaatgtttgctcagtagactgatgggtggaacaatgagttgcttgggggtcaggattaactctggaagtggtagttgtgggaagggttgaacctgaagattagggcgactcagaactgcaaagaccagggaagttgggttctgagaaggggcaggacagagagctgactaatttgtttcatttgtctacacatacccttaagcaaattttatcttgtacagtttgagtatggggtttatgttttcttaaaattcagcaagcctttaacaggaatgtactcagtattaagtgtggtgtcagattggctgcagtgtaggaaagcttttattccatgggaaagaagtccatgatttttggagctatctattatgcagttatgttgctatagatttagttatttggatctcatgattgaaatagtattttaaattggggacatcttttgtttgggagaggttgtttagaaatgacaggtgaagaataaaattattagagtaaaatttggccatatgtgacatgggcattaatgatccaatgatttatatatgccagtaatagaatttacaaaggacagccaatggtgagatgctgttctctggtggcattctggtaataaccagctctcgtatggtgcttgatagtttccaaagtacttttgcataccttatgttatttgtgcctccaaggtatgtaaaggaggtttatttcaattcagtgatcgtttattgagcatgttttgtgccaagttttgtactagatcttgggaaaccagcaatgaggcaaagaacttgactccaagttaacatagacaggtaacactgggatacacgcacaaccaggagtttaagtttggaaacaataattaaggagggagacatatgattaggatgtggtaatggtaggttgtgatggctttcctaggctttgttatattttttgtttcaaggaagaattgtgtgttttacaccactttgaaactatctttcacaatttacatagctgataatatacttttttttttttaaagcagtctagctctgttgcccaggccgcagtgcagtggcaccatctcagctcactgcaatctctgcctgccgggctcaagcgattctcctgcctcagcctcccaagtagctgggactataggcgcgtgctaccatgcctggctaatttttgtatttctagtagagacgagtttcaccatgttggccaggctgatctcaaactccctacctcaagtgatctgctgctttggcctcccaaagtgctgggattacaggcatgagccactgcgcccaaacatctgatgatatactttgttgttgttgttgttgagacaacgtcttgctctgtcgcccaggttggagtggtgtgatttcagctcactgcaacctccactttccgggttcaaatgattttcctgccttagccttctgagtagctgggactacagacacgtaccaccacacctggctaaatttttgtagttttagtagagatggggtctcaccatgttggccaggctggtctcgaactcctgacctcaggtgatccatcctcctcggcctcccaatgtgctgggattacaggcatgagccaccacgccctgatgatatacttttgaaaattatattacattttctacagttacactgtctttcctctgaaaaatctgggtgatctgttagaacatttgatctaagctacactccttgataatgtatttgtcgaaggaatgattaatttatgtgcataatttagtcctttgcatacaaaatgcaattttgtttattagaaatattttagataatgctttgtaggatttttgtgttatttttaggtctgaaaaagatgaagaataaaacatggcaagtctagagggaggcactgcttgaagtgcgtgaaacaaatcaagcatcaacaaaaatagaagcccttgagatgaagaacagaaaatctgtgattattatcattattagctttacagggatgttgaagtgatcaggatatcaatgacataattaagtggtattatatttttaaaatttgagaaataaggaaaccattgctttaggatatgtctcttatgtactcagaaaagcttgcttttgtaagttaagcctcaatgatgaataaatagtgcatttgtggctgggcgtggtagctcatgcctgcaatcccagcactttgggaggttgaggcagacagatcacctgaggtcaggagtttgagacaaggctggccaacatggtgaaaccctgtttctactagaaatacaaaaaataagccagacatggtggtgcacacctgtagtcccagctactcgggaagctgaggcaggagaatcacttgaacccaggaggcagaggttgcagtgagtcgagattgcaccactgcactccagcctgggcgacagagtgagactccatctaaaaaaaaaaaaatagtgcatttgtattaattacatggatacaattctgtataccaaagaaaaatatccacatttactgcagattcttttgtaggctgtgtagaatttcttactttaggccgggtgtggtagctcacacctgtaatcccagcactttgggaggccaaggcaggcggatcagaaggtcaggagattgagaccaccttggccaacatggtgaaaccctgtctctactaaaatacaaaaaattagccgggcatggtggcgtgtgcctgtaataccagctacttgggaggctgaggcagggaactcacttgaacccgggaggcggaacttgcagtgagctgagatcgcgccactgcactccagcctggcgacagagcaagattccgtctcaaaaaaaaaaaaaaaaaaaagaatttcttactcatatgaacttgaccctgtaaacactataagaaaaacttctttgctacaggttgattttcttttggaatgggatccctttattctgataattgattctaacagaagacttctactcaatgtgataatggaatgatttggagcaactctactatcaaatcagggaaagctagcctccagggtgatccagaggttctgctgtcaccttacaaacccaagacaagatttttcaccaggactgggctttggataacatatacgttccataacaatacctcgaaggaggcatgtgtttacatggcctagtgattttctctggttgcttttgtggaattcagatgctgattttatcagtgactaaccatgacatgtggggacattgtaagataattggtaagttttggaaaatctcacagtggctgggtaattcgatttcctttttgtgcaggatttggggatgagaatggcattcttttcttcttcttctaaaagctggaatcttgctatgttgccctggctggactcgaactcctgtgctcaagcagtcttcctgccttggcctctgagtagctagaactataggagcataccactgctcctggtgaaagtggccaggagttgaaataacagaaattttgttggcagagtgatttgtgctgtctctagcagaataacactgagcgagtaacttgacctctctgaatttcagtttctttatttgtgaaaagaaactaatattggccaggtgcagtggctcacacctgtaatcccagcactttgggaggccaaggcaggaggatcccttcagcccagaagttcaagattggcctgggcaacatagctagatcccatctctaaaaaaagtaaaaaataagtcaagcatggtggtgtgtgctcgtggtcccagctacttgggaggctgaggtgggagaattgcttgagcctgggaggttgtggctgcagtgagccatgattttgccactgcacacagcctgggcaacagagcgagaccctgtctcagaaaaaaagcccacaaactgatattactttatagggtcttgtgaaaataaagcattagcatggtgcctagcatacaataaatataattattctattatcaataatataaacatggagggcgattattagctcatttgctcctcaaaggtatgtaactcaataaagatgcattctcttctaatattaagtttccattgttaatacagaaatcgtccaggtgtggtggttcatgccagtaatctcagcacttgggaggctgaagtaggtagagagagcagttcaattttcttttctccctgcaggtgctgctgtcaagcttgaatgaaaggtatctcatgggtgggcgcgtggctcatgcctgcaatcccagcacttcgggaggccaagacaggcagatcgcttgagctcaagagtttgagaccagcctggacaaaaccccatccctgtaaaaaatacaaaaattagctgggtgtggtggcgcacgcttatagtcccagctactcaggaggctgaagtgggaggatcgcttgagcctgggaggcaaaggcttgcagtgagcccagattgcaccactgcactctagcctgggtgacagagtgagaccatgtctcaaaaaaaaaaaaaaaaaaaaccagacacatttcgatagaaacattactgcataaggtattaaaattatgtgttaacatttgatcaccaaaggaaatataagcattattgcattctatcttttagtattgttaaatttctttatttagtcgatgttgtattaaagttaaataaatgcatccttgtttctattgctttttgtttttatactagaagttgttattcaggaagaatagagaccaggctatatttgtaagtgttgtgaaagaaatcttataaaagataaactaagattaggcagtattaggtagatgcaaaagcatcagaatgcataagatgagtaggatacaaagtgtagttgaaaagccttggctgggcacagtggctcatgcctgtagtcccagcactttgggaggccaaggtgggaggatccctagagtccaggagtttgagactggcccaggcaacatagtgagacccccatctcttgaaaaaaagaaaaagaaaaaaaaaaaggaaagccttatgtctcagagctaagtgtctgtttttaaacaaatgtagccttagatgtcctgaaaaaatctgtcaaggtaaatttggtttggggtagaggtcagggagcacttgcagatgggatagagagaatttggaaaacgagcagggttccaaagtactgagcaattttcaggaggagtataaaagcctaggggataattcctatgcatctgcatagggaatttatttgatagctatattttcaggacctgttgacattttattcatccttaaaggcctctttcagttgccatttcccctgaagtcttctcagtttttctactagctaataagaacccatttctctctctttttttttctttttcttttttctttttttagacagagtctcgctctgtcgcccaggctggagtgcagtggtgcgatgtcggctctcccaacccccgccttccgggtttaagcaattctctgcctcagcctcctgagtagctaggattacaggtgcgtgccaccatacctggctaatttttgtattttttagtagagatggggtttcaccatcttggccaggctggtcttgaactcctgacctcaggtgatctgcccacctaggcctcccaaagtgcggggattacagggatgagccaccacgcctagccaagaaccattttctcttcagacaaaaggaactgttgtttggggtagcattttatttatacttataaaatgttatgttacagtttgtgttgttacatgaatgtatttgtctcttaaatcatggtatagtgtgaagaaaatgagttctcaggctggaaatatctgtatttgagtactagctctgacctttccaacaatgtgtctttttgtcatataatgtttattttcatagggttgttgggaggattaaatgaaattatatctgtaaagtaccttttataatctgctaatctgcaggtcataatctaatggtatagaatttttgttctgtactctttgataagaattctaaggaggtggtttggaaagagaaatttacagataccagatgaaatccaaaacccaggtatataaggagtcatatgcaagatctctgtctgttaatctgcctcatgaaaatgacgaaccaggagaatctatgggacagtaggaaaagctgccagtcactcagatgataataacatttaccttatacatttataatggaaatcctgccactgtttacaccagaaacagtttctttttttttttttaattttattattattatacttaaagttttagggtacatgtgcacaacgtgcaggtttgttacatacgtatacatgtgccatgttggtgtgctgcacccattaagtcatcatttatcattaggtatatctcctaatgctatccctcccccctccccccgccccacaacagtccccgatgtgtgatgttcccccgcttcctgtgtccatgtgttctcattgttcaattcccacctatgagtgagaacatgcggtgttttgttttttgtccttgtgatagtttgctgagaatgatggtttccagtttcatccatgtccctataaaggacatgaactcatcattttttatggctgcatagtattccatggtgtatatgtgccacattttcttaatccagtctacaccagaaacagtttctattgagaaaatggattttaatagaaaattctcatttaaaatttgggcagatatctgtattgttgagttaaccaaatgagaagagaaaaatccttacaacgtagcttgtcatttgcctgacttgatgcagactgctttgcttagtaatcatgcagcactatcaagactgtgtacataatgtcaggatccatctacataagatgtagtatggactgatgccaagtgagcctggggtggaaatcagaactggatgcaaatcctgatgttatccgagaacaggcacctgttacataggctgtgttactgtggcaaaggtaatggtaaaacacagactggccagaagcattgtgtacaatgagaccttgcaactttgtgtatattagtatgtggggggatgtgaattattaaagacatttaaaactgactgaatcagcaacctctaatctataaaaaaaaattccagacgtccagccgggcacgttctcgtgcctataatcttagtgctttgggaagctgaggcaggaggatcacttgaggccaggagtttgagaccagcttgggcaacatagtgagacccctgtctctacaataaaagtaaacaacttagctgggcataatggcatgtgcctgtagtcccagctactcaagaggtggagatgggaggatcacttgagcccaggagtttgaggctgcagtcagccgtgactgcaccaccatactccagcctgggtgacagagcgagatcttgtcttaaaacaaaacaaaacaaaacccagacttcctataattcctaaaaataaatgtgggtttgagaggcctaccttgaaatgtacaagatcctggccagacttcacctatctaacaatatgctagtaactatttgttgacatgtcttaaagaaatgttcatcagggcctcagaaagcaaggcagagaacaggtccctgaaatttactagcttgcaccaaaccatcagataaagataggttaatatttgacagaaaaaactcttcaaaaagagacagtgaaatactcttgagatgaatccaggtattaaaaagttcaggaaaaaaaattgtctctggaaaaaaaaagaatcaaggagagaccaggtgcggtggctcatacctgtaatcccagcactttgggaggccaaagcaggaaggtcacttgagcccaggagtttgagaccagccttgggcaacatagtgagaccccatctctaaaattatgtaaataaaaatataaaaataaaaaagagaaagcaaataaccccaaaataacttttatttttgttttttattttattatttttattttttttgatactgagtctcactctgtcgcccaggttggagtgcagtggcacgatctcagctcactgcaacctctgcctcccgagttcaagtgattctcctgcctcagcctcccaagtagctgggattacacatacaggtacgtgccaccatgcccggctaatttttatatttttagtagagacagggtttcaccatgttggcaaggctggtctcgaactcctgacttcaactgatctgcccaccttggcctccgtaagtgctaggattacaggcgtgagccaccgtgcccagccaacttttattttaataatagagatgcaatctcactgtgttgcccaggttggtcttgaacttctgagttcaagggatcctcccacctcagcctcccaaagtgcaaggattacaggcataagccactgtgcctggccaaaataactattttaatattaagttaaaaatagtacggaccaggcacagtggctcatgcctgtaatcccagcactatgagaggttgaggtgggctgatcacgaggtcaggagtttgagaccagcctggccaacatggtgaaaccccatctctactaaaaatatttaaaaaaaaaaaattagccgggcgtggtggtaggcacctgtaatcccagctactggggaggttgaggcaggagaatcacttgaacttgggaggcagaggttgcagtgagccgagattgctcactgcacttcacttcactcactgcactgcacttcagcctgggtgataagagcgaaactccgtctcaaaaaaaaaaaaaaaaaagtaaaaggctgggcacggtggttcacacctgtaatcccagcactttgggaggctgaggcaggtggatcacctgagttcaggagtttgagaccagcttggccaacgtggtgaaaccccgtctctactaaaaatataaaaattagccaggcatggtatcacttgcctgtaatcccagctacgcaggaggctgaggcaggagaatcacttgaacccaggaggcagaggttgcagttagccaagactgcaccactgcactccagcttgggcgacagagcaagactctgtcttaaaaaaaaaaaatagtacagtagggaaattatagttaacaataatttattgtatagcctaggcaacatagcaagaccctgtctctacaaaaaacaatttttttaattagctgcgtgtgctggtgcacacctgtagagaggctgagacaggaggatcacttgggcccaggagtttgaggttacagtgagctataactgtattatgccactgcactccagcctgggtgacagagcaagaccctgtctctaaaaaaacaaaataaaaaataatttatggtatatttcagaatagctagaaaagaattgtaatgtttctagcacaatgtttgtggtaatggatatcccaattaccctgatttgatcattatacattgcatacaggtgtcaaaatatcacatgtaccccaaaaatatgtacaactatgatgtatcaatttaaaaaaggaaaacattccaaacatctctccctctatgtgtatatacagataggaagacggatggagagatgaatgaacaataaaatatataaaggaaatcatacatgatacattttagggacagttttataagtatttgatgtatttgaagatcagctgttagctctcatcgacactgactgtcagtagatttttgaaggtagtaacagatacataggtaaccaaagtatagagagcttgtttagtgaatcttcatccttattatgttttctagatgaccacacaggtatacactatgggatagtccttatcttttggcccagacagctatgttgaacttggtatcaatgtgcacatctggagtccccatctccttcatggtgaatttctggatctctaagtgcctcctgaggagcttgctttgcttttttttttttttttttttttttttttgagatggagtctcactctattgcccaggctggagtgcagtagtgtgatgtcggctcactgcaacctccacttcctgggttcaagtgagtcttctgcctcagccttccaagtagctgggactacaggtgcacaccactgtgcctagctaaaatttttaaaattttttttagagatggagtttcactatgttggccaggctggtctccaactcctgacctcgtgatctgccctccttggcctcccaaagtgctgagattacaggtgtgagccaccgcgttcagccccagggcttgctttttgaagcccactccacggaggcacctgtgaatactgatggtgtattctcgggttaccacctggtagatgcagaatggcctgttctttttgccacccttttcaggaaccattctgccaggcccaaattggaaagcttacatgataatttttaacaaaaataatattttattggtggtcatctgagtacattttgcagttttcctccttttctccaaactctagaaatgacaggaagaaagaatttaatgtattcatagaagcatttgaaaacaagacgaattctcttatgagaaattctctactaaaattagatgggagtgaattgaagagggtaatggcagtccagtgtatatgtgggaactcaactcatagtactacctcaagaagtgggagctctattctcacattgccggtagtggaaactggaagcaagatgaagactcattatgggagctggtacagtgcagacccattctccctgtacccaccctggcctcccatctgtaagtcatgcatctgcaacaactatctccagacaggagcagcgtctcagaggtagagcaatgcctcaagtggctgacaataccagggagaaataaggagcgcttaagcctggaaaactagctgtggaggcgtcttttcttgtatcatactctacacatcttccagtcttactgaaaaacacatggagtgtaagttccaacaatcaaatctgtacctccttcaactacaccctaactccaaggccagttactttctcaagtcaagaaagtttcattctaataggaatctcagtggaaaaaactgcacttatggtaaagaattttcacatacttgagtactctttgaaacagagtttaaagaaaacatcttcacttgaggaaacagctaacagaattggaacagacctttagaaatagcataatactgtcagctgggtgcagtgggtcacgcctgtaatcccagcactttgggaagccgaggcagatggatcacctgaggttaggagttcatgaccagcctggccaacatggtgaaaccccttctctactaaaattacaaaaaaaaaaaaaaaaaaaatttagccgggcgtggtggtgggcacctgtaatcccagctactcaggaggctgaggcaggagaatcgcttgaacctgggaggcagaggttgcagtgagccgagttcacaccattgcactccagcccgggcaacaagagtgaaactccacctcaaaaaagagaagaaaagaaaaagcataatactgtcaaagagatgcacagatattgtatccatgaagcaagaatgggcgttataaaaaaaaggaaccaaattggagatcttgaaaatgaaaaatgtaatttttaaaataaaataataaatgctgattacaaagtggatacactgaagagtgaattagtgagctagatgtttggacagggaaattctcccagaatgcagtaggaaaggaaaggagaaggatggacatacgaaggaaaatttaggagacatggagggaagatccagaaatgctaacatcagtctaataggagtgctagacattgcagaaaaaggaggggagatatggacagtgttccttgttacttctgcaactgtcattctgtaacccctcttccttgctggccatcctgtctcccgctatagaggctgaaaatgtacacaaattgcttttccagccacctttgtagctgctgcatggatggataacccagtcccaatcaatgggatctgacaggaattctgctaggcaatttctgtgaaaggtacttctccacaataccaagaggagcataaggaaaaactgctttcctgtgttcggatgtgctatctggagctgcagtggccatcctgcaacctgaagggaacaaaagccattctgagaaggcagaacagaaagatgattcttgaatcctcacatacttttttttttttttttttttttttttttgagacaaagtctcactttgttgcccaggctggagtgcaatggcacaggcagcaatggcacagtcttggctcactgcaacctctgccgcccgggatcaagagaatctcctgcctcagccttctgagtaactgggattacaggcttctgctggcacgcccagctaatttgtgtatttttagtagagacagggtttcaccatattggccaggctggtctccaactcctgacctcaagtgatccacttgcctcagcctcccaaagtgctgggattacaggcgtgagctgccgcacctggccataattttgtttttttaatagagacaggggtttcaccatgttggccaggctggtctcgaactcttgacctcaagtgatccgcttgcctcggcctcctaaagtgttgggattacaggtgtgagccacggcacctggccctcatatactttagatatttgacaatgcaaataccttcttcgattctcctgttacctagcaaatttgtatatgtgatgtctttcatgggtagaaataattttgatgtaatcaaatttttatttgtttttctgtatggtttgtactttagaagttttaaaaatttcttccttgtctctaaatcagaaagttcatcctacattttattcagttaactttatagtttttctttcacatttcactccttacttcatctggaattcacctttatatatgttaggtcgcattctagttttattttcctccatatagtgaatcagtttttccagcatcacctaataaatgatctcttctttccccattgatttgtgatgctttctttattttacatcaagttcccatatagaaatgagtccttctctgaattctctactttgttccgttggcatgtcgcaccgatgccttatcattatggccttgcagtatgtcttaatatttgatagagcaagcctccctttctccatttacactaaaacaaaattttaagttacttttaatttttttgtagagatgtggtctcactatgttgcccaggctggtcttgaactcctgggttcaagtgatcctcctgccttggtctcccaaagtactgggattagaagtgtgagccaccacacctagccttacccttgtttttaaagattatctaatccaccaatgaacctttctccttcgtatacattgtagaatattttattgttttattttatttatttgtttgttttttgagataggatctcactctgttgcccaggctagagtgcagtggtgctattatggctcactgcagcctcaacctcccaggctcaagtgatcctctcacttcagcttcctgaatgtctggcactataggcatgcaccaccacacctggataatttttgtattttttgtagagatgggtttttgccatgttgcccaggctgttcgcaaactcttgggctcaagtgatcctcctgccttggcctcccaaagtgttgggattgcaggtgtgaatcactgcgcctgcccatgaggtatctttaattcaagcctgatagcagcagctgcagggaggcaagaaaattgaactgctgtctctacccagaaatttgatatagtatttatactttggagggaaaatgaaaggaaatgcatatgtaaggtaattgagaccatttataacttaaatgatgaataacagacatatgttatcaatcaactgatgctttttttttttttttttttgagacatggcctcgctctgtcacccaggctgaagtgcaatggtgtgatctcagctcactgcagcctcgacctcccaggctcaagttattctcccatctcaacttttcaagtagctaggatcacaggcactccaccacacccagctaatttttttatttttggtagagacagggtttcgcaggtttgcccaggctggtcttgaacttctgggctcaagcgatccacctgcctcagcctcccaaagtgctgggattacagacataagccaccatgcctggcattttatgcaattctttaaaatatgttttatgagctttggatagtgagcacagtccccagtcggtagttttttagcctttgtcctcatccttctccctccccctgtaggagtccccagtgtttattgttccatctttatgtccatgtgttcccaatgtttagcacccacttataagtgagaacatgtggcatttgtggcatttggttttttgttcgtgtgttaattaccttaggataatggcctccagctgtatccatgttgctgcaaaggacaggatttttttttttttttttttttttttttttttttttttttgagagacagagtctcactctgtcgcccaggcggtggctcaatcttggctcactgcaacctccacctcctggattcatgcgattctcccgcctcagcttcccaagtggctgggactacaggtttgcaccactacgcccagctaatactttgtatttttttggtagagacggggtttcactgtatgttggccaggctggtctcgaactcctgacctcaggtgatccgcctgcctcagcctcccaaagtagctgggattacaggtgtgagccaccatgcccaaccaatttcattctttttttatggctgtatagtattccatggtaaaaacagtaatttttaaaaaggctcagcttggattaattacacacatataccaaagttcagctatatgatgtttataaaagacacgtgtaaaacaacatagaaaacctaaatattaagaaatgaaaaatgataacatcagacaaatagtaaccaaaggacattgggagtagcaattgaataccagacaaaataggatgtgaaaaaaaattaagggagcattttattttgataaaaggaagaatctacctaaaataaattagcaatcatagaaatagtctcacactattagtattaaggaaacataaaacaacaagatactattgcactttttttttttttttagctactttgttaactgaaactattgccctttagattgcccaaaatgtcaagtacgggcaaagatgtggagaaaatgataagctctcacaactcttgagatagggatagggtatattgatatagagtcatttggaagagcaatttggcagtatctaataaaatgaaaatgaatgcctgggtgcagtggcttacgcttgtaatcccagcactttgggaggccgaggcaggcagatcacttgaggtcaggagtttgaaaccagcctggccaacatggtgaaatattgtctctactaaaaacacaaaaattagccaggtgtggtggcatgtgcctgaaatcccagctactcaggaggctgaggcaggagaatcgcttgaacccaggaggcagaggttgcagtgagctgagatcgcaccactgcactccaacctgggtgacagagcgagactctgtctcaaaaaataaaaaagaaaacaaatgtgtttttataattaaatgcttatatttctgggtatactgagaaacttttagatgcatacaagaatgatcatggtagcattgtttggaagtgcaaaaaatcaaagagtaataatctcagtgtccgttaatagaatggataaataaatgcggactaatcatacagtggtatatacacagttaatagggatgaattaactctatatgcagttcactcaacaatacagaatgaaaaaaagcaagatgcagtacaatatatttggtatggtaccattgtgtaaagaaaaaagcattattcacacatagcaatattatatatcattgctgataataaatatctatctgtctatatatctctaaataccaaaaaagctagatggaaaaggttttgctctgcattggagggatgggagtgggaatggtgtttaaagggaatattagctttctttataatattttgttttttaaaaaaatcaaatttggctgagcataatggctcatgcctgaaatctcagcactttgggaggctgaggcaggcggatcacttgaggtcaggaatttgagaccaacctggccaacacggtgaaacaccatctggcatgcgcctctagtcccagctacttgggaggctgaggtaggggaatcgctggaaccagggaggtggaggttgcagtgagccgagatcatgccactgcactccagcctgggtgacagagcaagactctctctcaaaaaaaaaaaaaaaatgacatttataattgttaattctgaatgatgggaatgtaggtgtttattttataattcctactacttttttttttttttttttttgagacagagtcttgctctgttgccaaggctggagtgcagtggcacgataattcattgcagccttgaactcctgggctcaagtaatcgtcccaccttgacctctcaagtagttgggactacaggcatagccaccatgcctggctaatttttttaaaaattttcctttttttaaaattttttttaaaaattttttattttttgtagaaatggaatcttgctatgttgctcaggttggtcttgaactcttggcctccccaaatgctgggattacaggtgacagccactttgccccacctaattccaactacttctttccctttaatgttttttcttggaaattgacaactaaaaaaaaaaaaaaggaaattaaagtaaaatggaagaaatggttaaacattagtaaatatttttcatctaagagctattatttctcagtctatctcttcaaagttaagaaaaaagatatgaaaatcactaagtagtagaatcattatatgttttagctacatgttttattattggacacttttgttaacatcttactatggaaagatgaagaaattgaagttaacactcagcttcctatcttctctcctcatcccattgcttttggtagttatattatctgttgaggtttatagcatttacattaggtcctgtgtagtcttagttctatattcaggtggaatcactgctcaccaccagaagtactttcccattactgatttatttgtattgattaattattaaattagattttgtttctttctttttttttttttttttttagaaaagctctttgtcttaaattccttggatttttttcatgttgagactatctctttttcttatatttgaacaacatcttgactgggtatcattttcttgggccacattttgtctctgaaatttgtggcatgtttcatgtttttctggcattgaaccttgcctcagagaggtctgagataagtccaattcccaactctgcttcaccccttttaggcaacttgctttattgtctggttggttgtgttcaaggaattctttctttaactttaatgtttagtgacttaactgggatagagatcagtagctaccatgctgtgtcagtttttttttttttcttggaacatggtgtgttatttccatctgtaactaatttccttatttattaaagagaaatttgaaagattatttctttgaataattttctcattttcctgttttattcataaagtcctttacttcagggacattagttaactttataacagatgccatgttcttcatacctattgtcttctctcttattcctttgttttcatcgtctcctttctcagctttcatcatcttttatctttttctttcttttttttttttttgggacggagtcttgctctgttaccaggctggagtgcagtggtgcgatctcggctcactgcaacctccgcctcctgggttcaagtgattctcctgcctcagcctccccgagtagctgggactacaggcgcatgccaccacgcccggctaatttattgtatttttagtagagatgggggtttcaccatattagccaggatggcctcaatctcctgacctcgtgatccgtccaccttggcctcccaaagtgctgggattacaggcatgagccaccgtgcccagccctcatcatctttatttttaacctttgtgatatgttcatgtgtttccttaagttgtcttatttattagttttttaatgatgctgttttgatcctgtctgtttccttgtctcttcagtcttcctcttcatctcaagttgtcttatcgtattgtctttgggccttttttaaaaagagaattcatggccaggcgcagtggctcatgcctgtaatcccagcactttgggaggccgaggtgggtagatcacctgaggtcaggagttcgagaccagcctggcaaacctggtgaaactccatctctactaaaaagacaaaaattagctgggcgtggcagtgggcacctgtaatcccagctactcgggaggctgaggcaggagaataacttgaaccctggaggcagatgttgcagtgagctgagatcatgccattgcactccagcctgggtgacagagcgagactccatctcaaaaaaaaaaaaagaaagataatcgattctattattagactgttgtataaaacaaatcgtttgtggtaatttcctttcatttcttgagttatgctatcttccagaacgaggttagttattgaaggtttggaaaggtctttattttccctcatgcctgactggtagaggatcaaattctaagctgaaaacagagttttatttatttttatttatttatttttttgagacagggtctcactctgtagatcctgtacagaggctgtagtgtagtggcacagtcacggctcactgcagccttgacctcctgggctcaagtgatcctcccacctcactctcctgagtagctgggactacaggcgcaagccaccattcccagctaatttttgtattttttgtagagacaggttttcgccatgttgcctaggttggtctaggactgctgggctcaagcgatctgcttgccttggcctcctaaagtgctgagactgcaggcatgagccgctgcacccggccactgaaaacaatagtttaatttttattatatttatagatatttttcagcaaccatactttttatttccaagatctctttcttgttctctgcttgttccttttctatagcagactatattttgttaaactgattaaatatattcctaaaaactttctgagtatactttctgaaatttggaatttcaaaatagttcctttccattaaattctgtttgtttactttggttctgctctgtttgctttgctgtttcatcaaatgtctgggagttcttggctgtccattcctatttaagaatataggcatgtagtatggaccatctatactgtcttgtaggtaatctgtttctctagtataggctcactccaggatgggtaagctggcttaggtttctttctacaagggtggtatatgtcaagtggtaggcacagaatgcacagagaaggagcagtctgggaggttaggtcctctgaaattccaagatgagacaggttcccactgttagggccagcactcactctagaagacctactgtatccaggcagatcattattttctgagacagagtcttgctctgttgcccaggctggagtgcaatggcacaatctcggctcactaaaacctccaccgcctgggttcaagcaattctcctgtctcagcctcctgagtagctgggactacaggcgcatgccacaaagcccagctaatttttgtatttttaatagagatggggtttcaccatattggtcaggctggtttcgaactcctgacctcaggtgatccacctgcctcggcctcccaaagtgttgggattacagacttgagccaccgccctcagccagatcattctttttaatctttgcttatctgatgtgcaaaacagtcagaagcttttatgattaagaaagaataaaattaaatggactaaccatttttgagaaactaaaaaatgaacaacaaaataaatgaaaggaaaataaaaataagtaaaggctgggcgcggtggctcacacctgtaatcccagcactttgggaggccaaggcaggtggatcacgaggtcaggagatcgagaccatcctggctaacaatggtgaaaccccatctctattaaaaaatacaaaaaattagccaggcatggtggcgggtgcctgtagtcccagctactcgggaggctgaggcaggataatggcgtgaacccaggaaaaaaaaaaagagaaagaagtgaagatcagctgggtgtggtggctcgtgcttccactttgggaggctgaggtgagaggattgcttgagctcaggactttgaggccagcttgggcaacactgggagaaacagcctctataacaaaaaataaatcaaaaaaattagctgagtgtgatggtgcatacctgcagtcacagctacttgggaggctgaggtgggaggatcgcttgagcctgggagttggaagttgcagtgagccaagaacgcaccaccacacactgcattccagcttgtgtgacagaccaggaccctgtcttggaaaaaaaaaaacaacagtaaagattaaagcagaaattagtgaataaaacccagaaaacaatcaaattaatgacaaatctaagaacttgtcttttaaaatagcattgaaatagaaaaatctctattaagataaatataaagaagcaaattaaatacaaagaagcattaaatatattgcattagtaatgagacaaatgaatgtgatcagatttcatggaggtttaaaacattcaagataatcttttaaatttaattttttaattattattaaattttttttttatagagatgaggtctggctgggtgtggcagctcacgcctgtaatcccagcactttgggaggccgaggcgggtggatcacccgaggttgggagtttgacactagcctggccaatgtggtaaaaccctgtctctactaaaaatacagaattagctgggtgtgatggcacacacctgtagtcccagctactcaggaggctgagacaggagaatcgcttgagcttgggaggtggggattgcagtgagccgagatcatgccactgcactacagcctgggtgacgagtgagactctgtcataaaataaaataaaataataaaataaaataaaataaaataaaaaatataaggttttgctgtgtttcccaggctggtcttgaactcctgggctcaagagatgctcccacttaggcctcctaaagtgctgggattacaggtgtgagccaccatgcccagcctcaagagaatcttgtgctaataattctgaaactcataatgaaataaatattttaggaaggtgtatattaccaaaatttagtcaagaagtaggaaaagtaactggacgcagtggcttatgcctgtaatccagcactttgggaggctgaggcaggagaatcacttgaggctaggagtttgagaccagcctgggcaacatagtgagatccacatctaaaaaaaaaaaaaaaaaaaaaaaagaagaagaagaagaagaagaagaagtaaaaaaggtgataggcgggatgcagtggcttattcctataatcccagcactttggtttgggaggctgaggtgggcagatcatgagatcaggagttcgagaccagcctggccaacatgatgaaaacctgtctctactaaaaatacaaaaattagctgagcgtggtggtacgcgcctgtaatcccagctgctcaggaggctgaggcaggagaatcgcttgaacctgggaggtggaggttgcagtgagcaaagatcgcgccactgcactccagcctgggcaacaagagcaaaactccatctcaaaaaataaataaataaataaataaataaataaataaataaatgtgataaaagttggtagaaaagtgagaaattatcctaagactctccctactccaactagaattgggctggttctatagagttttatgggcaagctctaattgtgatactttacttcctatctgaatattgccacacctctaacaaaacatccatagtatttacttctttctattcagttctctggtaaattagataagaaaaggcagatgttgtaaacttgtactatctatctacctactcaacagatgctaataggtgtcaagccttgccccaagagctggtaacaaagatgaacgaaagatccacaacttaaaaatattaagatatatttatatcatttatatcaaagatatatttataccatttcatttgggggcagcaagttcctcttttattattatatccctgctggtgagaaataaccccatttgtatcttatggtgaatatgatctctgattatgttaaatacttagaaggcccggcatgacggctcatgcctgtaattccagaactttgggaggccagggcgggcagataacctgaggtcaggagttcaaaaccacctggccaacatggcgaaaatccatctctacaaaaaatatgaaaattagccaggcgtagtggcacatgcctataatcccagctactcgtgaagctgaggcaggagaatcccttgaacccgggaggcagaggatgcagtgagctgagatcatgccacttgcactccagcctgggtgatagagcgagacttcatctaaaaaaaaaataaaaaattgtgcacctgtagtcccagctactcaggaggctgaggcaggagaatcgcttgaacccgggaggcagaagttgcagtgagctgagatcgcgccactgcactccagcctgagcaatggagcaagactccatctccaaaaaaataaataaatgaataaataaaaataacataaaaaataaataaaaattaagaaaccacaacaaatactcagagatagaggatgttggtgggcttaagaggaggaaaaatctagtactaggaatgttgtggaagtggtggctattttttgattttttatttttatttacatatactttttgagacagaatatctctctgttgcccaggctggtgtgcaatggcacgatctcgactcaccgcaacctctgcctcccaggttcaagcgattctcctgtctcagcctcccgagtagctgggttacaggtgcctgagtggtggctgttttaaaggaattggtttcaagtttttacaattgtgaactccatcaataaaaacgggggggtatatatcccccattatatgtatatctgtttattcataaataatattaatgtatcatatttaatttatataaattaaattataagtaatactccatgtgttaaattaattatatattaattataaaacgaataaaatacattttaaagttaaagatgaaaaataatattttaaaatcaatttttttttctttattttagagatgggttctcactatgttggctagatttgtcttgaactgctgacctcaagcaatcctcctgcctcagcctcccaaagttctaggattacaggtgcgagccaccatgcccggctaattttggtattcttagtagagacaaggttttgccatgttggccagactggtctcgaactcctgatctcaggtgatctgccctccttggcctcacaaagcgctgggattacaagcgtgagccaccacacctggcccataattgtctttctaattgagtagaatataggggccaaggacttcacattgtttctgtattcccagtacctagattagtacctggaaaatagtaggggctcaataaatatctgataaatgaatgaatattaagaatgataggctgggcatggtggctcacgcttgtaattccagcactttgggaggctgagttgggtggattaccctcaggagttcaagaccagcatggccaacatggtgaaaccccatctgtactaaaaatacaaaaattagccaggtgtggtggtctgtgcctgtactctcagatactcgggaggctgaggcgggagaattgcttgaacttgggaggtagaggttggagtgagccaagatcatgcgactgcactgcagcctaggtgacaagagtgagactttgtctcagaaaaaaaaaaaaaaggaaggaaggaagaaagaaagaaagaaagattggctgataccaggcaggaggatctctcaagcccaggagttcaagaccagcctgggcaacatagtgagactttaaaaacaaaagaatgataggttgggcatggtggctcacacctataatcccagagcttcgggaggccaagctggaaggatcactcgaggccaggagtagttcaagaccagtctgggcaacacatagtgagtccctgtgttaaaaaggctgggcacagtggcttatgcctgtaatcccagcactttgggaggccgaggtgggtggatcatgaggtcaagagtttgagaccagcctggccaacatggtgaaaccccgtctctactaagaatacaaaaattagccaggggtggtggcatgtgactgtaatcccagctactcgggaggctgaggcaggagaatcgcttgaacccagcaggcagaggttgcagtgagctgagatcgtgccactgcactccagcctgggtgacagagcaagactttgtctcaaaaaaaaaaaaaagaaaagaaaagataaaggaaaaaaaggaatcatagttaaaaagcaaagaaaaaaagtgtaagatcagagcagtaagcatgagtgtatatttcagcagccctggttggaggagggatggtgatatggtttggctttgtgtccctgtccaaatctaaggtctaattgtaatcccccgtgttggaggaggggcctgatgggaggtgattggatcatggggcagcttctaatggtttagcaccatccctctagggctgcttgtttaaatgcatgtagcacctctcccactcacctctctgttgctggtcatgtgaatatgtgcttgcttcccctttgctttctgctatgattgcaagtttcctgaggcctccccagaagcaaaagcttgtacagcccacagaacgatgaaccgattaaatctcttttctttataaattacccagtctcaggtagttctttatagcagtgttagaatggactaatacagaaaattggtaccagagaagtggggcattgctataaacatacctgaaaatgtggaagtgactttgggactgggtaatgggcagaggttggaacagtttggagagctcagaagaagacaggaagatgagggaaagtttggaacttcctagagacttactgaatggttgtgaccaaaatgctgatagtgatatggacaatgatgtccaggccaaggtggtctcagatgcagatgaggaacttactggaaactggagtgaaggtcactcttgctatgctttagcaaagagactggtggcattgtgcccctgctctagggatctgttgaactttgaacttgagagagatgatttaggctatctggtggaagaaatttctaagtagtaaagcatttaacagtgggtgcttctaacagtgtatgcttatatgcatgtgcaaagagattatctgaaactggaatttatatttaaaagagaagcagagcataaattttggaaaatttgcagcccagctgtgtggtagaaaagaaaaacccattttctggggaagaattcaagcaggttgcagaaatttgaataagtgaagaggagccaaatgttaatagccaagacaatggggaaaatgcctccaaggcacttcagagaccttcgtggcagcccctcccatcacaggcctggaggcctgggctgaaggccctgctgctgtgtgaagccttgaaacctggcaccctgcatcgtgatcactcagctccagccatggctaaaaggggccgaggtacagctcagccattgtttcagaggatgcaagctaaaagccttagtggcttccatgtggtattaagcctgcatgtgtgcagagggcaagaattgaggcttcggagcttccacctacatttcagatggaaacacctggatgtccaggcagaagtctgctgcaggggtggagccctcatggagaccctctactagggcaatgcagaggggaaatatggggttggagtccccacacaagagtccccactgggcactgcctagtggagctgtgagaagaaggccaccaccttccagaccccagaatggtagatccatgaatggctcacactgtgcacctggaaaagccacaggcactcaacatcagcccatgaaagcacctgcagggtctgtgccctgcaaggttacagatatacaactgtctaaggccttgggagcccaccccttgcatcagtgtggactggatgtgacacatagagtcaaaggagattattttggagctttaaggtttaatgactgccctgctgggttttggacttgcatggggcgtatagcccctttgttttggctgaattctttctcttagaatgggtgtatttacccaaggcctatatccccattgtatcttgaaagcaactaacttgattacttgtttttgactttacaagctcgtcggtggaagggaagtcttgccttgtctcagatgagactttggacttggacttttgagttaatgctagaatgagttaagactttgagggactgttaggaaggcatgattttgttttgaaatgtgagaaggacatgagatttgtgaggggccaggggcagaatgatatggtttggctctgtgtccttgccctaatctcatgtctaattataatcctcagtgttgaaggaggggcctggtggaaggtgattggatcatgggggcagtttctaatggtttagcaccatccccttagtgctgcttgtttaaaagtgtgtagcacctcctccacccccctctcttctgccagccatgtgaagatgtgcttgcttcccctttgccttccactatgattgtaagttttctgaggcctctccagaagcagaaacctgtaccgcccacagaaccatgagctgattaaacctcttatcttttttcttctttttcccctgagaggagtctcactctgtcactcaggctggagttcagtggtgcgatctcaacttactgcaacctctgcctcccaggttcaagtgattctcgtgcctcagccaactgagtagcggggattacaggcacccaccaccatgcctggctaatttttgtatttttagtagagatggggttttgccatgttggccaggctggtctcgaactcctgacctcaggtgatccacccaccttggcctcccaaagtgctgggattacaggcatgagctactgtgcctggcctaaatctcttttccttataaattacccagtcttaggtagttcattttggcagtgtgataacagactaatgcagatggaatttatcttctgataatcttggggcttggattttaaaccacacatagggaaagagacaagagctttagcttggtcaacatggaaattgaaactaagatacctatctaaagccaggatgctcaaagggctgtcccttcaatgaaagaggtagccaggaaaaaaaaaaaaaaaagctatcccctgtatcccctgacacaggcagccaacaaggaaacatatttgtttcagcctgggtagaaaaataaataaaaatctgctctggtaaattgtaactttatgactttctcatttgggaattgtattaggctgtttttgtgttgctacaaagaaataccagaggccaggtgtagtggcttacacctataatcccagcactttggaaggccaaggcaggtggatcacttgaggtcaggagtttgagaccagcctggccaacatggcaaaaccccatctctactaaaactacaaaaaaattagccgagtatggtggctcatgcctgtaatcccagctactcgggaggctgagggacaagaatcgcttgagcccaggaggcaggggttgcagtgagccgagattgcactactgcactccagcatgggcgacagagcgagactctgtctcaaaaaagtaaaagaaaaagaaatacctgagactgaataatttatcagaaatgaggtttaattggctcatggttctgcagctgcacaggaagccatgtggcatctgcttttggggaagcttcaggaagcttctaatcatggcagaaggcaaagtgggagcaggcacatcacgtggtgaaagcaggagcaagagagagcaaggtgccacacttttattttatatatatatatatatatatatatatacatatatatatatgtacacacacatatatatatacacacacacacatatatatatatatatatatttttttttttttttttttttttgagatagagtctcgctctgtcaccaggctggagtacagtggtgtgatcttggctcactgcaacctctgcctcctgggttcaagtgattctcctgcctcagcctcatgagtagctaggactactggcgtgcaccaccatacccagctaatttttatatttttagtagaagacagggtttcatcatgttggccaggatggtctcgatctcttgacctcgtgatctgcccgccttggcctcccaaagtgctgggattacaggtgtgagccactgcacccagcctgttgtttttatatattttttattttatatttttcagactgctcagcctcttgagtagctaggattataggtgcccaccaccatgcctggccaatttttgtagttttactagagatggggtttcaccatgttggccaggctgatctcgaactcttggcctcaagtgattcgcccaccttggcctcccaaagtgctgtgattacaggtgtgagccaccatgcccagccaaggtgccacacttttaaacagccaggtcttgagagaagtcacttgctatcatgaggacagcaccaagggatggtactaaaccattcataagaaatcaacccccatgatccaatcacctccctccaggcaccacccccaatactgggaattacaattcaacatgagatttgggcagagacacacgttcaaactatatcagggattaaatcatattatctttgtagtggagaaattccccaaactctgtaaactaacatcaatgtagtcatgaacacataatattgagatgtgattgcagaagtgaactcaacccagatctcctagcaataacaaagataaaacccagttgaagatgagctcataatccataattacaaatacaggagaaaacaatcctggaggagggagagtcagcagacacaacaaactgcaggaccaggctcccatgaatagcaataatgatcagatacagattagagactttgttttaaagaatgaaaaacacaaaagacggaacccaaagcataagcaaataatatgatactttgaaaaaagtcagctttagagaaggaccaaaccaatcttgtaaaaattaaaaaataggttttatttatttttttcttaaaattttcattattttctctgggcacggtggctcacgcctgtaatcccagcactaggggaggccgaggcgggcagatcacctgaggttgggaattcgagaccaacctgaccaacctggagaaaccccgtctctactaaaaatacaaaattagctgggcatggtggctcatgcctgtaatctcagctactcgggaggctgagtcaggagaatcgcttgaacctgggaggcagaggttgcagtgagccgagatcaccccattgcactcctacctgggcaacaagagcgaaactccatctcaaaaaaaaaattactaattatttatgagtaacaaaagcccaatatgtgttaaattaaataatttttttgaaaaatagctatttttcacatagtaagactcacaaaaaataactatttttctaaacaacaagaaaaattcattagtgagaagagtcccaactgctttacttttttgagacagtcttgctgtgttgcccaggctggagtgcagtggcgtgatctcgtctcactgcaacctccgcctccccagttcacgccattcttctgcctcagcctcccgagtagctgggactacaggcgcccaccaccacgcccggctaattttttgtatttttagtagagacgggatttcaccatgttagccaggatggtctcgatctcctgacctcgtgatccgcctgcctcggcctcccaaagtgctgggattacaggcgtgagccaccgtgcccggccatgctttacatttttgcaagtatctttaatgtctgacggtagatgaaagctagattctcttatctacttctttattcagcctgttataatatcacaccagatagctgctcaaaaattcctctggacactcatgagaaaatgagagtgcaaaagataaattatgtcttagtattataacaatagctttgacctaggatactcttcaaaggctcttgaagacccccagaccatactttgagaaccactgctctagacgaatgtcatcattttacaaataaggaccctggacctcagagagagtaaatgagaaatccaacatcacacagcctgtcaatagtaggatacagacattagatggtttgtctcacttctctgggtttaggttctcagttggaaacctgggaaatacaccctaatggcctgtcccattccctgtaagttgcaaagactatcacaatgtattacccccaatccactttttaaaaataaattaataattttaaaaataatttaaattaataaatcaacaaacttggtaaattttgcaacaggcatactgtgtttgaatctaaactacaatatttgaattctgatttctatttgaacagaacactaaggcaaattcgactgcatcctattccatgcaagctagtaatgacaaactgcacagtaaatatcacaggtaaatatggaaagcagattacccataatatcagtatttatcatatatcctgtgtctgaaatataattcaattatacatatttcagaaaaatgttatcaagtactagctgaaagggtggtgggtacattaagagactgcaaataaactggtgatcacaagaacttttttagataaaatggagttgcaccgaaatgtagatatttttcattccctaacctgaccttatttttgtcttttaaagaaaatcaagaaatcttcttggccacctagagatgatttcctttgtatcctaccagatggttcagatcttctttaaatggaacatagttttgttcttttaaagaacacagggcccagaaggaggaaattgttcccagggaacccactcccaactttcatttttttcaggctctacattctttggttctgaatcatgagtcacgtccacttctcctttcattaatacagtaacataatggtaattcttctcagtgaaagaattcacaactgaggcaaagcgaacatttttcaggtgaagagcttcttcccaggtttccctttgagcacattcttcccagttcttactgaactccaaaatgacccccagaaagctgaaaactgctggctccaaatgaccctttcctcctccccaggaggacacaacacggatgcttgcagctggtcaccacaactcagactctgactctgggcggccgccctgcggcttcatgttggctgtcatagtgcaagcaggaggaccaaaaaatatgttttaagttggttaacactaaagttgagtgaatgggctgggcgcgatggctcacgcctgtaatcccagcactttgggaggccaaggcaggcggatcacttgaggtcaggagtacgaaaccagcctggccaacatggtgaaaccccatctctactaaaaatacaaaaaaaaaccccaacaacaacaacaacaacaaaataggcatggtggcgtgcgcttgtagtaccagctgctcagggtactgaggccagagaatcgcttgaacccgggaggcagaggttgcagtgagctgagattgcaccactgcactccagcctgggcaacagagcgagactctgtctggaaaacaaagcaaaacaagtttagtggatggattaagtagcagattagaaagagctgatgatataatccagtaactattaaatgaaattaagaaaattccttgtaaggtagtatggagagacaaggagatagaaaatataaaagatatggaaaagagatgcagatagttttacacagtccaatagaaatataatatgagatacatacatgcataatttaaattttctagtaccaacctaacagaaagtaaaaagaaacacatgaaattaatccaaaatattatttcattgtgtaatataaagtcacgaataaatattttatattctttttttcctactgtctttgaaacccagtgtgtattttgcacttataccacacgcagctcagtttggactagctagtgctcaacagccatatgtggctagtgactattatactggacaatgcagatctaacttacatgtaataagatttccaagatagaagggagacagagaaggcaatatttgaagagataatggcagataattttccaggattactgggaggcaggaatcctgagattcaggaaagctggtgcatcctgatcaggatgtaaatattttgtagtgaagctgataaaagctgaaaacaaaaaatttgttaaaattaactacagggaaaagatggattacctacaaaggaacttcgattagactgaagacagtcacctttaaaatgttgactgaaaagttacaatgtaggaattttatacccacttgaactatcaataaagagtgagagtaaaataaagtcaaagacaaggttatcactaacagactttcactaaaagagaactgtaatacaattcaaatacgataaggtgtctggaggtctggggagatgtggcagtatgtgagagaagggttccccaaaagagataaaaatataatgtacattttccttgttttttactatttttccccctctccagagctcgaatggtaatgaatgcatagttatggagtcagcactagtgtagaactgcaagccttaactccttgtcatagcgttagggaagcaggagcctaggagagccagaataaggtcattttaaaatcaactccatcttttttttttttgagacggaatctccctcttgttgcccaggctggagtgcagtggcccaatctcagctcactgcaacctctgcctcctgggttcaagcgattctcctgcctcagcctcctgggtagctgggattacaggcacctgccaccatgcccggctaatttttctacttttagtagagatggggttttgccatgttggccaggttggtctcgaactcctgacctcaggtgatctgcccgcctcagcctcccaaggtattgggattacaggtgtgaaccacctcacccggccaatcaactccatcttaaaaccagcaagacacaccatgcgcagtggctcactcctgtaatcccagcacattgggaggctggactgggcagatcacctgagatcaggacttcaagaccagcctggccaacatggtgaaaccctgtctttactaaaaatacaaaaattaggcccagtgtgatggtgggcacctttaatcccagctactcgggaggctgaggcagaagaatcgcttgaaccttggaggcgggggttgcagtgagccaagatcgcaccactgcactccagcctgggcaacaggagcgaaactccgtttcaaaaaaaaaattagctgggtgtggtggtgcacacctgtaatcccagctacttgggaggctgaggcaggagaatcgcttgaacccagaaggcagaggttgcagtgagccgagattgcaccattgcactccagcctgggcaacaagagtgagactctgaagaaaaaaaaaactagcatgacccatggtcataagatgtttatagttgaggaaacaacctaaagattacctgcaaggacagacttctacaaaaacagaaaagcccagatgtcccaatacccataacaagatttgctttcaagataattatgcttttttttaaagatagttatgctttgatgtactcacacagtagaatgtcaaggataggtttctttaaatcaataccataataaatttggtcatgctgtctgcccatccgcatgtaggcacagcttagtttagtctttgtatagacaaagatccctatagaagaaaaacttaaagactatgtgttcctccacttgctttccaaggacactctattctataatggagtagctttcaataaactatctcttctcactgcactccgattctccttgaattcttcccagtgcgagagccaagaaccttctcttggggtctggaccaagactcctttttccagtaacaatagggtaggagagagaggagaaggaggagcatatatgcttgtattggcaggatagtacatcatagtattcctctatttgctcaactttgggatacaaaatgtttagaaagatcggtgaacaatcaagagctatatagaaaaaaattgttttggaatatagagtagcatagggaaaattagggctgtgtagcatgtttgggggtggcatgaggacagaaagaagcgtgacagggaggggagggagacgagactgagggtgaggaagcttaagatgggaactagaactgacaattgatcaccactctattactatgaaaattacctgttgggctgcgggcagtggctgatgcctgtaatcccagcactttgggaggccgaggtgggtggatcacctgaggttgggagtttaagaccagcctgaccaacatggagtaaccccgtctctattaaaaatacaaaatcagtcgggtgtggtggtgggcgcctgtgatctcaggtactcgggaggctgaagcaggagaattgcttgaacctgggaggcggaggttgaggtgagccgagatcacgccattgcactccagcccaggcaacaagaacaaacaccgtctcctaaaaaaaataaaataaaataaaagggaaatagaactgacaattgatcaccactctattactatgaaaattatctattaaagattcatttagccctccaactgggctccctgaggaaggggagtagtgggtgctaatcagctaatttaatcagcgacttaattgcaattttaataactgccactgattgaatacttatatatgtgtcagtaatagcactgaagtgttctagtgtctttaaaaatttaaacttcaaagctgggcacagtggtgtgtacctgtagttctggctagttgggagactaaggcaggaggatgtcttgaatccaggagttgccttggcaacatagcaagaccttgtctcttaaaaaaaataaatttcaacaaatctgtgaagtaaaattttaaaattgtggtgaaatatgaataacatcaaatttaccattttaaccatttaaaattgtacagttctggcctggcgcggtggctcacccatgtaatcccagcactttgggaggccaaggcaggcagatcacttgaggtcagaagttcgtgactagcctggccaacatggtgaaaccctgtctctactaaaaatgcaaaaattagcagagcgtggtggtgggtgcctgtagtcccagctactcaggaggccgaggcatgagaatctcttgaacccaggaggcagaagttacagtgagccgagatcacaccactgcactccagcctgggtgacaatatgagactccatctcaaaaaaaacccaaaaaacaaaaaacaaaacaaaacaaaaaaaagttatgtggcattaaatacaatcacattattgtacaaccattaagtaaaatcaatttttaaagtagttttactgatgatcaaactttgtatcagatagttaagtaatttgactattagttggtagcagagataatattgagctccatgtttgtctgacttcaaattctgcgctcattttctatagcatgtagtcctgcaaccttttggagggagatgagattcaaacaagtgaaacaggctgggcatagtggctcatgcctgtcatcccagcactttgggaggtcaaggtgggaggaatcccttgaggccaggagtttgagaccagcctgggcaacatagcaagaccttgtctctcaaaaaaagaaaaatcagctgggtgaggcatggtggctgacgcctgtaatcccagcactttgggaggccgaggtgggcagattacgaggtcagcagatcgaggccatcctggctaacacggtgaaaccctctctctactaaaaatacaaaaaattagctgggcgtggtggcgggcgcctgtagtccaagctactcaggaggctgaggcaggagaatggtatgaacccaggaggcggaggttgcagcgagcagagatcgcaccactgcactccagcctggacaagagagcaagactccatctcaaaaaaaaaaaaaaaaatcagcccggcattgtagggcatccctatagtcccagctactcaggaggctgaggtaggaggatcacttgagcccaggagttcaaggctacagtgagctatgatcatgccactgctctccagcctaggcaacagagcatgactctgtctctaaaatcctttttttttttgagacgaagtcttgctctgttgcccaggctggagtgcagtggtctgatctcggctcactgtaacctccacctcccgggttcaagtgattctcccgcctcagcctcctgagtagctgggattacaagtgcctgccaccatgtccagctaatttttgtatttttagtagagacgggtttttgccatgttggccaggcaggtcttgaactctgacctcaggtgatccacccacctcagcctcccaaagtgctgggattacaggtgtaagccactgtgcccagcctgtgtctaaaaaacttaaaattaaaaaaaaaaagtaaaaataaaatttacattaaaaaaatttaaaaattgacgtaataaaatcacagactgtgttaaatgctaggaaggaaatagaatgatgtgatggttactagattgaaggcataagagattacttatgatgggattgcacagaaggccactttgtggaaatgacctttgagctgaaacctttgaggggaaaatataaaggctttgaagtgagaaggaacgtggcatgttagagtcaaaaaaaaaaaaaaaagaaaaaaaaaagaaaaggtcagctgagcaaagtgtgtaaggggcaaagtgataagagtcgaagttggagaagtaggcaggcgccagattatgcgacactttgtggaccacagtaaggaggatgctaaccagactctcacaaggccagagcattagagatatacagaggaggtacaaagaatctcaaagtggggaagaatggcatagtaagagggtgagtgtgacactgagaatgtcacatttctgagaatgactttcattttagtaatacttacatttagggacattgttaacctgtggatgcaatcaatgacaggtgactactacacagtagtttgtgatccctataatatagagtctcagtattatgtaatgaagatggcctcccaaagtgctggaattacaggtggtgagctagattttattatccctgttttgtagatgagaaaaccaaagatcagagaaattaagaaacatgttaaagtcatcagctactaagtggctagcctagttgaaggcaaatattggattttccttcctttgccctggagatgccatgggaaaatctcataaatctctctctctctctctcttttttttgagacagagtcccactctgtcacccaggctggagtgcagtggggtgatcttggctcactgcaacctccacttcctgggttcaagaaattctcctgcctcagcctcctgactagctgggattacaggcacacaccaccatgcctggctaatttttttgtactttcagtagagacggggttttgccatgttggccaggctggtctcaaactcctgacctcgtgatccgcccgcctcagcctcccaaagtgctgagattacaggcatgaaccactgcacctggcccctaaatctcttttatgccatttataatgattgaaagtccagtctagcctaaagcaaaactttaatttcatatctaacttaaagcttttcccctgtctctaagtctcaggcagttgaaaatttgtgtttggtctgcagtttcactcttttcattctccaccctctcactctgctgtttctgggtttcctccagggtggaggaggttttggtgaaagcagagaagtaggaggaattaaaagaggtcaaggtctcttctcttacatgactgatgacgtcagaggcagagacccaggtgctggttctttctcgttgggagcatttatgtattcttgtgttctttggaggatctacctgtggatctcaagactcccatcagtgactgcctcctgaagtccacacttccatcaacttatttctgggtctccttacactagcatacggtcctactgaataggttcctttaagaaggtcccggatgatctaccttttcagcatcctcttggctcataagaaccttgccatgtcaaacacagggagtggaagctaccctattgttgccttttctccctgtcctattgtagagtgtgccagccagcttccctaattcagaattctgcaggctagaagtgggtgcccatcttcatgaatgtgcacacatgccaaactcctcaagagacatgtctagttcatctcaaaactttcaccatgatgatcacacagggatgggctcataagtttccacagtcagcaagactcactagcttgggagaaagatctggcagacactcctagtcttttacagtgggggtccccaaccctgggccaaggaccactactggtcagtggcctgttaggaatcaggcctcacagcaggaggtgagcggctggggagccagcattactgcctgagctccgccccctgtcagatcagctgcagcattatattctcataggaggcaaaccctattgtgaactgagcatgccagggatttaggttgcctgctccttatgagaatctaatgcctgatgatctgaggtggaacggtttcatcccaaaaccatcccccctcctcacatccgtggaaaaattgtcttccacaaaactggtccctggtgccaaaaatgttggggtccactgttttatggtactccctctttgtagtgaggccagcactctatcctctcctatgatttcttctaaagcctcccacctcagcctcccaagtagctgagactacaggcgtgcgccaccatgcccggataatttttgtatttttagtagagtcgggggtctatgttgcccaggctagtctcaaactcctgggctcaagcgatatgcccacctcgccctcccaaagtgctgggattacaggcatgagccaccgcgccttgctagaagccatttaatccaactctccatcaaagtcatgaatcctgtttacaacaacctgatgagatgtcaactacttttcacgtgaacacacccaggaattaggaaggcattccctaaccggcagctcttatctctcccaatcacgatttgagcttcaccaaataactcaaacccctgtttcctcacatattaaaggggagtaaatatctgctttacagaacattgttgggagaataaaaggagatagaggaatataaatggcctaatccacttacagaggagggtgtgcaatgttagtcccctttttgcctccttttatgggacagcacattccatttttggatcgtcatcacctagagaaaggtcttccttaatactgaattgtctttgtatccttttagcacctttcttaagtttaaccctaagtggtctcatagaatgtcatttttccgtccacacgacgtcttcactgatatctgtgactttagttgaaggggctgaagatattgggaagaataattcaattttttccttcctccgtccctccctccctcccttccttccttcctttttttttttttttctttgagctggggagctgggtgaggcttctgtggattcccaagaggtatttgtggcgtgaatggagcaaaggtgatgtttcacttcatcacgtccagcactgtcccaaggttaaatgggcgcgtgaggacagttttctccggtcctggcgggtttgcccacctgccggccagcgttctgcgggagtcaagcctggaaagcgtgtgtgcggcgcacaggcgtcagacactggaacgcattcgaatggtgctattctttgccacatagcgagcactttataaggtcacttatcgtcccgaatgaatggttaaatcgtggaagccgcaaagaaagccacgcagctttgactcaatacctagcccagtactcaggaacccctctcaggggtgcgcgagcggggccggaatcaagaagcctcttttggggtgggcggggaccgatctagagctcccactgcggggcaccgcctcttttcctcgccggccgcccgctaggaggcgctggggagcttgcagcccacctgcgaggcggtcccgctctccccacccctcagcccgcgcccggcggagagactacaactcccggagtgctctgggaacggagccacgggagctacaggcggagggacccgagggcgggctttccgggtgtgtgtttccggcgtcggcggccgcggccggggacggtgtgagagcggtaagatggcggcggcggcggtggtggagttccagagagcccagtctctactcagcaccgaccgggaggcctccatcgacatcctccactccatcggtaaaggtcgccgcgccgcctccccggccccgccggcccagctcggcttatgtcggtcggcggcagcggagaggggcccggctagccggctctgatgctgctgactcactgtgtgaggggggccgggccgggggcgcaggccgctcggagctccccagagcctcccaggtctcactcttgtgggagggcttgaggcaatccccgggtcccctcgccggctgctgactcacggggggctcagcgtagggtgggagagtgggccgagccgggcccccggggatccctccctagccatgtccccggctctggcccgcacgagctggtctgggacccggagcagtgccggccggcgtgcttgtcacggactggtcctagagtctctacttgaaaggccttggcgaaaccagctctggacaggcatttcccgccgttgtaatcagcacagcctgctccgggtgggagcgcgagcgcttgctcttctctgggagtttccttccacgggacgctgggagctgctactcctcagccccacggcagaaagctccactaagaggagggtctctttcagaatgtgggaaattcaggggtgacacacacctcagattggcatttggtttgtggaggtggccgagacgctcatctgctctgtgtagggtgtaagagtgaggtgttggagcgggaccgcctggctagaggaggtgactaatctttccagactgcctgtaggggttggaagtgagttaagggagttagttgtcagccgcggagttcagggaattctttggaacgggtcggctgcatgttgccggaaaaattaaaatttcttaacgctgtaataacgatggtcttacacctacacacaacaggaaaactgaaatgggaatcccagccagtcgcttccggcagctttctgttgggattcaagtgtgaacagaaatttattacgacagaagaagacgttaatgttcactcataaaggattcaattagggcttggactagctcttcactgcacatgtaatggcatctttgtagtgtagtttgggaagatctgaattggctcaacaagtagtatgagaatgcacctgtatgtgggacttgcaagatgttggcatttgacttagtgtgttgaattttggtattccagacctgcacggagaaaggacaatgacaagatcttgatactttatcattggggatactagagaaggagaggaagtgggcgtcaaggtgtatctttgaatgatattggtaaaaggtgtttcattttaaaagttctgatcttaggtcagttacttctacggaaccagagtcatctcaatcaccgttacatggatattttattctgagtacacactattatttagaactaatgtgaggagcatgaattttaatagtctgtgtctagtgtctaatattttttctttcataaagtagaaattacgtcaaatattacaattagagtatttcctgttggcccactattctaggggagagttccctgaaagcttcactgttagagcaagcttgagtcatggtggttgacggccttactttttctggactccatcatggtttttgtcaagtcatgatgctttgtaagagtagtagtaactagtgatgatcactacaaacttggagaggctattccatgtttgaatgttaaaatagttattaactgttgaaaataggacagatagcacaaagttattttaacagacctcaatgcattaaaaagcagcagtctcccctaagtgtagctgtgcaggatctggggctttgatagagttgtttttcttgaatggctttatagacctgcttatccctaacacacccatcagctgaggctttgcacagacctaaagtttattgaaacgcttttgacttacaggcatcagtaacttggtcaattgattttagtttgtggcataaacgcacaggcatgtttaatatcttcccataaaatagtgactggaacagatcttggcaccataagtatgaaggatttgttttgttttaatttcactttaaccaagtgaccacaacagaaacttagtgtatgtaggtaagcaaaattctgctgggtagaatgaaaaggcacatttaaaatcaaagagaagaatcctttttttatgatttacatggagcatattctacgtatatatgatcttttttttttcctggcttagagttttttttttttttttaactctagaatttgtcttttggtaaatatgtttgagtttgtaatggatcttatgagggtgaaatttccctcagtcttcattttttggtcagaattttaagagggtttgcattttcctctcccagtgaagcgtgacattcaggaaaacgatgaagaggcagtgcaagtcaaagagcagagcatcctggaactgggatctctcctggcaaagactggacaagctgcaggtaagtgctacacatggattgtatctgaaatgctcagtgaaattcctgtcttttgttggagtgaagaatcatgggactgatccacaaactgaattcagctttattttcttggcaacttgttgagcttcagttttttagcaggcaattaagtggcctttaaactcacttctttcctggtagtttagttttgcaaatgagagacaatcttatttttgttgggatatagtgatttctgatttgtttctggtttttgaattctcactgtattcccttacatagaggcagcaacagtcttcaataatttcactgagcaactctgatgtatttaagatagataacaactttaagcgcctgatttaaaaatgacaaaggattttgtatccaagtgactcactgtcatttttttttgatagattcagaatgagaatgaataagacattaaatggagccttcccaagacttctgcattcatacctaggactttgtgcacatcattgctcaaacattctagttgtaattgaaccattgactgattagatttgacataatattctgatgatgggtgtgtccttggaatgagaagggagtccttttgatcaggaaggaccttttaccagtaaagtggtaatagtatttagagagaagtctgtttaaacttaaatgggtgatttttgtcaagtttaaagtgaatttagagcttatttgattagattggattaagatctggtaagtgacctcatgaattattttccctaaaattatgttgttcaagagaatgatgggggttagttagcacaacttcttcaacttgagaactaaagattttttttttctttttctttttttttttttgagacggggtcttgctgtgtcacccgggttggagtgcagtggtgcgatcttggctcactgcaacctccgcctcctgggttcaagcgattctccttcctcagcctccggaatagctggaattacaggcacgcgccaccaagcctggctaatttttgtatttttaatagagacgaggtttcactgtgttgatcaggctggtcttgaactcctgacctcatggtccacccacctcggcctccgaaagtgctgggattccaggtgtgagccattgtgcccggccagtgatttttttcaattaaagataactaacttattaattattaggctcagtctatagagctgaataaagatgtatgaaattgtgaggatgtgtttacatgggccttatatcttacttaaaacatcattaagtagctataaaaagaaccatccataatggtttttgagtgctatgaacttttttttttttaattattattatttttgagacagagttttgctcttgttgcccaggctggagtgcaaatggtgcgatctcggctcactgcaacctctgcctcccaggttcaagcgattctactatctcagcctcccgagtagctgggattgccagcatgcgccactatgcccggctaattttgtatttttttttttagtagaggcgaggtttcaccatgttggtcaggctggtcttgaactcctgacctcaggtgatctacctgccttggcctcccaaaatgatgggattacaggtgtgagccactgcacctggccaagtggttactcttctaaacacatacatggtttaacttaattgaatcctcgaaacaacttgaagtaggttttgttaccattttacacatgaggatactgagcacagaaaagttaaataacttaacaaagctcattcaactaataactggtagacctaggatttgagctcatgtagtcttacttcagagcccatatagccacatgacatcatggttattgctttcctataactgtctacttaaatgaattatcattggtgggtggtgtcttttcatcttaggctgacttccttcctatttaacatacataaggattccacttgtctgtcagttaatttgagcttggggggttccaaaacagttttgataattactccatgcaaaatataataaggtaatttttctgaattataaagccaactgaagtgatgtgaaaattttttttgttgttagccaggcgtgatggctcatgcctgtaatcccagcactttggtaggctgaggtaggaggatcccttgagcccaggaatttgagaccagctctggcaacataatgagaccctgtctctacaaaaaatagaaaaattagctgggtgtggtgttatgtgcctgtagtcccagctactctggaggctgaggtgggaggattgcttgagccgaggaggttgaggctgtagtgagctatggtcacactgccgtgctctagcctgggtgacagagcaagaccctgtctcaaaaaaagatttttttgttgttgaaatatccaaatttctactttcctccagtggcatgaattaagaacagtgtgtggtatatagtcaatacttaagtaattttcatccaaaaatgttactgttttgcttgaaattcctattttatatgtattctccccttatttcttgcccttcctgccttgtgacctgagaagtttagaagtgtactgctaaagctattggaatttaatagatgaattataagaactttcaaaaacatttccatgttacttattgttttctaagaaagtttgatgagtataggtatacacaatgggaactctaaggaagtgttgaggcctacatatatttagctgtctttgctattaatgatatgtttgtattgtttgctcctgagaacagaaaatatgtctgttccattaatgttcagtttttttatgcatttaataaatgcatagcattgtgctaagtattctactcaaaaatttaagataggatccctggccaacaaaaatcacttggggattaccaaataaaacaatgtctgatgtgtaattgtgattgcaagtagtgttagtagtgttgagcatcatcagacatgatgccttggctcaggatttcatagcctaaaacttctaaaaggaatctgttgagttctgtgaggtcctgcctcaggctcccaagtggctggaactacaggcgcccaccaccacccccggttaatttctgtatttttagtagaggcggagtttcatcatgttgtccaggctgatcttgggctcctgacctcaaatgatccacccacctcagcctttcaaagtgttgtgattataggcatgagccactgtgcctggccttttttttttttgagaccgagtttcattctgttgcccaggctggagtgcagtggtgtgatctcggctcactgcaacttctgcctcctgggttcaagcaattctcgggcctcagcctccccaagtagctgggactacaggcgtgagccaccatgctcggctaatttttttttttttttttttcttttagtagagacgaggtttcaccatgttggccaggctggtcttggactcctgacctcaggtgatccacccgccttggcctcccaaagtgctgggattccaggtgtgagccaccgcgcccagccaagttctgtgaggttctgacaaggaaaatctggtcatataattacagataatcccagtaagaataggaggaagtcagtatgattttatgggacttaaaaaaaaattaactcagtatgtatgaaagtggaaggaaacaggaaatacaaacaagaatgaatataaaacagtagtagactaaaacagatgatgaactgagtctgaaaaatgcaggtgggcacagtggctcacacctgtaatcccaggactttgggaagctgaggtgggaggattgcttgaagccaggagttatgtggaccagtttggaccacacagcaaagaccctatctctgttaaaaaaaattttttttttttaaagcagcatgggtaacataaggagaccacatatctacaaaaaagataaaaaaattgactgggtgtggtggtgcgtgcctgtgtcccaggtacttgggaaacagaggcaggaggatcacttgagcctgggaagtcaaggctgcagtgagccacaattgtgccattgtactacagcctgggtgactgagtgaggctctttctcaaaaaaaaaaaaaaagaaaaaagaaaaagacatgtagggggacaactaagagatcatttgcttctttcggcgtaagaaggataacactcagtgcttagagaaaatattgtaaggctagcaggtgttagaaaggcacactgcttagctcatatttcacttctgccttttctaggaaggaaaatgattttcaaactgcaaaagatagaaataacagcagaaagagataattaatggtaggtgagagaagacagagcagatagtctctgtaaataagttcaggtctctaggctctaacagtttcttttattatcaaaaaaatagttttagcagatataactatagagccatatattattctgagaaaaatcatggagaggtataaggaagatgaggcaaatgttatcctgcctttcaagagggtaatgcaaagaatagatgtattcactgtgtgctgcacattgaaataaagaaattaaaaataaagagtagacactatacatggtcatcagtggtagagttctgggacagattatttgataaggagatagtaatctcttaaaaaaaagtggatttattgtgaacagattattccaaattcaccttagttctctctgttttgttttgttttgtttttttgagacagagtctcactttgtcacccaagctggagtgcagtggcacaaccttggctcactgcagcctcgacctcctgggctcaagcagtgctcttgcctcagcccgccaagtaactgggactacaggccttcaccaccatgcctggctaatttttgtagagagggggtttcgccatattgcccaggctggtcttaaactcctgggctcaagcagtctgcctgtcttggccttccaaagtgctaggattataggtgtgagccactgcacccagcctagttctctttttggttagctttatcagacccatagattttcaggggtctgcatgccacctgtttttgtaaataaagttttattggaacaaagccacgcccatttgtttccacattgtgtgtgactggctgagttcaggacctgctactaagaccatataacctgtgaagccaaaaaaatttactatctggctcttcacagaaaaagtttgccagcctctggattagaggaatgatatagactgtatatctgatgtaagcagggtagttgaacatttgccataatattaatatcacaggtacaggttatgaatttacaatgggctgaataactgtatccaaaacatgttaataaatggatcatttgtcaacctgaagggaagtcttcaggcattgtgtcatgaggatctgtccttgtttttctggtcagcatctggaatcatggttaaagccatttcagaagggatgcttatttttgtagatgactcagtacagttagaagacagaattaaaattcacagttattgccaaagccaggaagattaaattcagttgcgataaggattaaattatatacttaaagtatttttcaaaacagaggaagttgggggaattacctgttttgacagtagtctattaaaaagaactttaatgggctcagtctgaacaaagagaggtgttagaaaaagcaaaacatgctatcttgtgttacatatcatggccagatcaagagaattaaattgcctcctggtctactgtcagaccctacctggagcaatcgttttcatttctgggtaccacaaaataccacaagtagtacctttacaaagtagagtttgttcagaggagagcaactaagttacctagaaacaaggacttcggaggaacagttgaaatagccaaagatgttaagcttggataaagggaaaattagggaaatgtaaatgataattatctttaagtatttaaagccatgtgaaagaaggtatagatttgtgttttgtgtttcaaaaaggaataatttgttttggccaacattggaataggctgctttgtgaacatttctgtgactagaaatcattcagaattgttcaggcacaggaggaaattctgtgggagaagggacattgcttcagactacttttaaaaagctatcattacataatataattgaaataaatgcaaaaggaatttgagggggagaatcactgtagactggagttacatgggaaactcaataggacttcagatggacctaaaaggatatataaggtttatatagactgagaagatggcaagacatttcagatgggattatggcattagtgcctcttgaaagcaggagtatatactgtagtcttgtgcagaggtgaatgaggtggcagaatggcgaaaagttttaaacattgggaatcaaaggtcattactggggagtgaagggaaaagatgaacttttctactctatatcaagttcttaagtaccggacacagtcccatgcattctctgactattcaggcagatgaggatttcagggccttgaattagcattctctggagggtgaggtttgcttgccctgaattagagttctcaggagggtgagtctgcaattggagaatattaaagaggcagtggcactaaagtaattttaacctacattccaaaatacctccttagttgttgagttgaaccattctctaatttttactatttgacaagcatatctctagtttattgtttcaaaagatgtttctttagagttcatatactgccctcttctatatagtgggggaaaagctctgtgatggatcccttttttggtcatagtttaagacttaggttttgaagattaatgaggaatttaaaagagatatagcagcactttaagggcaaaacactcttctatgtgaaaagtttattcagaagagtgccagggaagtgacaatgcagaaaggctaaactggggagcactgcagaaagacaggaaaaaggaatctggagtagaaaatctctgtctaaggggaacagctgaagcagacttggaagttagaaaaaaattacccctatgacctgatcatatttattggttgtgaggaagtaattttgtgaaggtggcagggacacagcatatttcatgttctagaaaactggtttttgagattatgaatactttgctgtttatctttcattaagatggataaatgaagcagagacatgagcttttcctgcaacttcatagtaatccagtggctgagtagggaacagaatgcaaatttggtatatgatgttaacttatttttgctattctgctatttgctaggaatgctttaaactcctagtaagtttcacttagactgattccagtgatgtaagtaccgatttttatgacgttgggtcagtttcttaagtgggtattttgtctcaaatgttgatgtttactcctctttttgaattgcctttcctacagagcttggaggactcctgaagtatgtacgacccttcttgaattccatcagcaaggctaaagcagctcgcctggtccgatctcttcttgatctgtttcttgatatggaagcagctacagggcaggaggtaagtgatattaatgacagaaagtagacaatatggagaaaagtttgtttccaagaaagaaatgcctacctgcactttagtactaatgtggaagggaaaactgggaggacagcgcaggacttatcatgtcagtttctctttgttacagggcatttgatactttgggtctgttccatgctttgctttgtaagtggagattgtcagtggtccctggaatcctcattacatcagggtcacaaactgattcttgtctttgaggtattgtattgccacacctttgtaatgttttctgtgtctgtggtacctttcatcttgtgtcacaaagctccttctgagcactaattaagtcttgtggtattccttcttagcatgttttgtactgcatatatgcctttattgaggggtgagcatccatccatttgtgtctcattgtgcagaagtgactctggtgttcctgtatgtgtcccacaagttcagactagaccctgagctgtattaaagagtgcttctcagtaatcactgaatcttccaaccttctcaaagataactgtattttctgcaattcaggaagagacgcataccaaaattaaacatcattctgtaaaaagtggcagattgaagcagggtatattgtcattgcttgaatctgtttgtaggaagaatatagttgttgtttttcttatggatatattgatcagtactcattgagtgcctgctacgtgttaggcactgttttaggtattggggatacagttgtaaaaacacagtcactgttgtcatgaggattattttttaacggggaacgcaggcaataaacaaatgtaaaatggcagataatataagggcagaattgctagttggttatatgtctgattgtttgctgtagcctctgtgggcgtgaaaggtatgaaaggccatagtagcatattgaataaatgggaatttcagaaacctaggacacatggatcctactttggaatcataccttttgtaaaatctggctttaatgattctttgaatcctgatttaaacactatatactaactttatttgtagaaaattcatttgtagagtagtcttcagatttatgtctctggcaaaactgtttgatgatagtatataaaaagttagatggctattttgaattaaagtgtcagttattttaatgaaaaaattaaaagttatttagggtattagtcttatctaactttttttaaaaattgtactttaaaaaactcatgagtccgggtgcggtggctcacgcctgtaatcccagcactttgggaggccaaggcaggtggatcacgaggtcaggagattgagaccatcctggctaacatggtgaaaccccgtttctactaaaaataaaaaaaaattagccaggtgtggtggtgggcgcctgtagtcccagctacttgggaggctgaggcaggagaatggcgtgaacccgggaggcggagcttgcagtgagccgagatcacgccattgcactccagcctgggtgacagagcgagactctgtctcaaaaaaaaaaaaaaaaaaaaaatcatgaaagtgataccattctttgtttgaaatagagtaccttaaaatagactgatcagtaaatgttaatttgaaactgactgataaatgttacttggaagtttttgggcagaaaagttaattatggaagctgctcctttttgcacactgaagtttctgaaattatccatccccataacctagagctcactcagcggatagaacagcatttatttttttttattggtgacagagtttcactcttgttgcccaggctggagtgcaatggcgtgatcgtggctcactgcaacccccgcctcccgggttcaagggattctcctgcctcagccttctgagtagctgggactacaaacatgcatcaccatgcctggctatttttttttgagacggagtctcgctctgtcgcccaggctggagtgcagtggcacgatctcggctcactgcaagctccgcctcctggattcatgccattctcctgcctcagcctccccagtagctgggactacaggcgcccgccaccacgcctggctaagtttttgtaattttttaggagagatggggtttcacagtgttagtcaggatggtcttgatctcctgacctcgtgatctgcctgcctcggcctcccaaaatgctgggattaccggcgtgagccaccgtgcctggccctaattttgtatttttagtagagacggggtttcaccatgttggtcaggctggttttgaactcctgacctcagatgatccacccgccttggcctcccaaagtgctgggattacaggcgtgagccactgtgcctgacttgcatttatttaatgatcatttctcctgttcctttgtggaaatccattcaagtgctctgctatagttcgctagtaggatttcctggcctttgtcatatggctccctgactggttaggcgctcccttaactgtggttatatgttgtcattgttcattgcacattacatttatataaagtaaagacctttcttcctttccttagggtgaaaggaaacacttttaggcattgtatcattttatcatcagtgtcattttactttttagtaaaggctgtttttgttttcgttttttgagacagccttgctctgttgcccaggctggagtgcagtgacacaatcttggctcactgcagcctcaacctcctggagtcaagtgatcctcttgcttcagcctcctgagtagctggaactacaggcatgcaccaccacactcggctaatttttgtatttttgtagagatgaggttttgccatgttgcccaggctggtcttaaactcctagtctcaaatgatctgcctgccttgcccttccaagtcctgggattacaggcgtgcagcactacgcccggctaaggctgatttttttgatggttagcagctttgcttttatcatgaaccagagtcttattccactaagtaggacctcttttggtaatttttgtggattataggttatttgcttgttttggagcaaattgtgaatcatccagactgtctcacctgcacctcagactcaatatgggcaacctcaacatccagccatttgttaaattttgtcaattcagctttcttcattgtctgcttctccacctcttttgtatttgttctctctctctctttttttttttttccccgagatggagtcttgctctgtcacccaggctggagtgcagtgttgcgatcttggctcactgcaacctctgcctcctgggttcaagcaattctcctgcctcagcctcccaagtagctgggattacaggtgcccgccactgcacctggctaatttttgtatttttagtagagacggagtttcaccatgttggccaggctggtctcgaactcctgaccttgtgatctgccggcctcagcctcccagagtactgggattataggcgtgagctactgcgcccagctgtggtctctctttacaactaccatctagtttggttcttaatttttttttacttggactactgtaaaagcctcattccatcattgtcagagataccttaccaaatagccctctgataattttattcctctccctcttctcccacaactcaaaccttcagtggctttccattgcctgcagaattagataattaatggttttctataatacaacctactgcaacctactgcagtagtctaatctcccaggactctactaagcatatcaaatatgtcagccatgttggatccctggctgtttgctgaacaagcctgtataaccctcatgctgtacctttctcttccatagtcttatctcaagttctacctcctctgaactctttccttcctgactttaatgtggttttaactctttcagtgactcacattgtattttgtacatgctctgagtattctgccttgtatgacagtggctttacacttgccttgtctcctttactgtaatacaatctcactcaggtgaagcactatgtgccttgcagtaccacagagccttcctcattcccagtacagttcaaattccttaaccatggctacctctgaccacatccactatactagtctccttttactttctttacagctgtaattactggccttattgccttatgcttcaaactgtctggggttgggacattcatatacatatggattgctgtcagcttgatcttaacaggattttttttctttacactgtttcaagtctttgctcacatcttacctcctcagagactttccttgatcaccctatctttgtttcctttttaacaatatttattttttacaaaaattagccaggtgtggtggtgcatgcctgtaatcccaggtactcaggtggctgaggcacaagaatcacttgaatccaggaggtagaggttccagtgagccaagatcgtgccactgcactccagcccgggcaagagtaagaagagtgagagtgtctcaaaaaaaaaaaaatacatatatatatatatatatatatatgtatttttttttttgcttatatactcttaagttgtatccctagcccttagagtactttggcttgaagaagctgcatacctatttgtcaaaggaatgtatggactgtgcctgtgccttccctatggtagatgtgcagtggtatgctcacagctcactgcagcctcaacttcctgggctcaggtgattctcccacctcagcctcccaaataactgggagtacaggtacacaccacgacgcctggctaattttgtttgtttgtttgtttgtttgtatttttagtagagatgggattttgctatgttgctcaggctggtctcaaacttctgggctcaagtgatcctctggactcggcctcccaaagtgctgggattacagatgtgagacaccatgcccagccaggaaatactttgttgaattaagatctgagtttattgaattgaaatgtaagcatggggtgttgttactacattcgtttaggtaactcaaggtctctgacttggggaaataggatataatttttattcttagttcttttttctttttgagatggagtcttactctgtctcccaggctggagtgcagtggtgtgatcttggctcactacaacttctgcctcccgggttcaagtgattctcctgccttagcctcctgagtagctgggattatagtagagatgggcttttgccatgttggccagggtggtcttgaacttctgacctcaggtgatccgcctgtcttggcctcccaaagtgcctggtttataggtgtgagccaccacacccggccttgttcttagttcttttaaaattttttgactgggtgttgggaaagaatagacaagcaagtcataggtgggaaagaatagacaagcaagacataccatggctatcatggtagtattgaggcctgaggcaaaatgggaagttttatttatttgaaatgggggtcttggtctgtggcccacgttggggtgcagggtgcaatcgtagttcactgtaaccttgaacatctgggctcaagcatttctcctgcctcagcctcccaagttgctgggactgcagatgtgcaccactacacctggctaattaaaacaatttttttgtagagatagggtcttgctatgttgcccaggctggtctcaaactcctggcctcaagtgatctgcttgcctcagcctcccaaagtgcctggattacggatgtgagtcactgtgcctggtttaaataagacgttttagaatactgttaagacagctagaattttgtgttaaggagtttggtactgagaatatgagggaggggatttcccttgcttttttctatttgaggactaactataagacagatatatctggtcaggcatggtggctcacgcctgtggtcccagcactttgggaggccgagtgggcggattgtgaggttaggagatcgagactatcctggctaacacggtgaaaccttgtctctactaaaaatacaaaaaattagccaggtgtggtggcgggcgcctgaagtcccagctactggggaggctgaggcaggagaatggcgtgaacccgggaggcggagcttgcagtgagcgccactgcactccagcctgggtgagacactgtctcaaaaaaaaaaaaaaagacagatatatctagagaaccatcttcagcttgctattcccaaagttggtatgattcaggttatgatctgttcatttaaatgcaaggtttggagcctagaaagtgagggcatgtgagtcggggagtgagagagtgaggatgggttggttggcaagggctggggagtggaaaagtaaggtgaagaggagggaaggaagactgaaccagactcttgccaaatagtgaactcaactttccttccagggatctctggggagtagcctatgggcaacttttctggtatagtctacccaattgaaacacaatagcactttttcttttttttgagacggagtctcgcaccgtcgcccgggctggagtgcaatggcatgatctcggctcactgcaacttctgcctcccaggttcatgtgattctcctgcctcagcctcccgagtagctgggattacaggtgcacaccaccacaccctgctaattttttgtatttttcgtagagatggggtttcactgtgttggccagactggtctcgaacccctgacctcgtgatccgcccgctttggcctcccaaagtgctgggattacaggcatgagccactgtgcccgacccacaatagcacgttttaagaaacctctctactaaaaatacgaaagttagctgagcatggtggcaggcgcctgcaatcccagctactcaggaggctgaggcaggagaagtgcttgaacccaggaggtggaggttgcagtgacctgagattgcgccattgcactccagcctgggcatcaagagtgagactctgtctcaaaagaaaagaaaaaaaaaaaggaaaaggaaaagaaaaaaagaaaaaagatatccagttcgtgtaaaaaaaaaaaaatccttgctgtaggagaaacatctatgatgaccttaacttaaggctgggttaagataggtagagtgctggagttaggcacaagttctggtgccagcagcagatatatgtgatagtccagatattaaccgattagtagtccttaggt

SEQ ID NO: 61 - DNA, 159497 bp, Homo sapiens
gcttcttaacatggtttgcaaggtcattcatgatctgttctcctcatgcacactccctgccttcattctggaagtcaataccaaactatttgttgtccaccaagcatatgttcttttctacaccaggcttttgtccatgctattttcacctctctccctctcgcccccacctaattaatgcctctcatccttcaagtctcaattcagatgacaatgtttctcagcagtgttgaggttttcccagtccccaggccagagatgttccttttcatgtggctccctagcatccttggcttgcacattcttagctcctgcctcattctgttgaaatgtctttgggggccgggtgtggtggctcacgcctgtaatcccagcactttgggaggctgaggtgggtgaatcacgaggtcaggagttcgagaccagcctggccaacatggcgaaaacccatctctactaaaaatacaaaaaattagccgagtgtagtggcgggcacctgtaatcccagctattcgggaggctgaggcaggagaatcgcttgaacctggaaggtggaggttgcagtgagccgagatcgcaccattgcactccagccctggcgacagagtgagattccatctcaaataaaaaaaaaaagaaatgtctttgtggtccacctcccacttgtttgtggttccttagaagtggggagcctgtctcatttttgtctccctagtacctagctcagtacatttgctttttttttgagatggagtctcactctgtcacccaggctggagtgcagtggcacaatcttggctcgctgcaacctccgtctcctgggttcaatcacttctcctgcctcagcttcccgagtagctgggattacaggtgcgtgccaccacacccagctaattttcttttttcttcttttttcttatttttttatttttttattttttgagatggagtctcgctctgtcgcccaggctggagtgcagtggcgtgatctcgactcactgcatgctccgcctcccaggttcatcgacattctcctacctcagcctcccgagtagctgggactacaggcgtccaccaccacacccagctaatttttttttgtatttttagtagagacggggtttcaccgtgttgtccaggatggtctcaatctcttgacctcgtgatctgcccgcctcggcctcccaaagtactgggattacaggcgtgagccaccgtgcctggccacacccggctaattttcatatttttagtagagacggggttttaccatgttggccaggctggtctcgaactcctgacctcaaatgatccacctgccacagcctcccaaagtgctgggattacaggcgtgagccaccacgcccagccagtacatttggtttttgtttgtttttatgtttgtttgtttgagacagggtctcattctgtcacccaggctagagtgcagtggtgcaaacacggctcactgcatccttaacctcccaggcttaacctgtcctcctgcctcagcctacccagtagctgggactacaagcatgtgccaccatgcctagttaatttgtaaaattttttgtagagatggagttcactttgttgcccaggctggtcttgaactcctgggctcaagtgatcctccttgcctcggtctcccaaagtgctgggattacaggcatgagtcaccatgtccagcactcagtgcatttggttaatgtttattaaacagaatttagggtgggtccaaaaggtcaagtcaggtagaaataacttctctgcatcattttcaactcattacaatattggaattaatatgaagctcataagtatgacttaaaatttgtaggaagaacaaacccatgacaggtaaatcagtattatttgtaaattttttatattaacctgcttttctgatatttaagaaaatgggcctgctacagtggcttatgcctataatcccaacacttactgggaagccaaggtgggtggattgcttgagcccaggagtttgagccagcctgggcaacatggtgagaccccatctctacaaaaatacaaaaattagccaggcatggtagtgtgcgcctgtggtcccagctactcaagaggctgagatgggtagattgattgagcccaggaggtcgagactgcagtgagctgtgatcgtgccactgcactgtagcccgggcagcagagtgagaccctgtctgaatttaaaaaagagaaaaaaagaaaatgttgttactttggaatgagcattattatgactcttctgaagagtgccaaaatcactccagagagtttccttgggaaagtctaaatgataccaagtgaagatattcttgtaaatggtgttacctcacaaaagacttgttgcaattttatattaatttcttaaattttaacatttgattaatgatttattttactcttgaattttttcaacaggctgaaaatacctcctgattgcactactgaattaaatcatcatgcatatttatttctccaaagcacctttgacaagcatgatttggtaagcctttagctgtaattttccattatatatagtaaaacatttttctatggatgatataactctgttccctgagctatgggatgtgtatgttacatagccaaaaactgcttaacctctctaagttaaattcgcaaaaatattttctgctgtttacctttgttgttttctcaagatgaaaatgtctaatttctaatagactctcttataggttttcttacatacatttgaggaattttcttgataaaatgtaaaatttgttgtcatttattaagtagttttaaaaagcatagctttactagattggggggcttttgagttgggaattattatcttagatatctaaacattctgtatccttgtgtttcttcaggatagagactgtgctttgtcacctgatgagcttaaagatttatttaaagttttcccttacataccttgggggccagatgtgaataacacagtttgtaccaatgaaagaggctggataacctaccagggattcctttcccagtggacgtgagtatagagctcacctctttcctctagagttacaaatagtttaaaattatggtgtattacatttgtcactttgtaagcttgtgaggcattatgaaattcttcaatcataattgcctctaagcaagattagctgctgatatctctaagatgaactataaatgttctataaatttatcaggaagggattgttttcttttgaatgatatatagggaaaaagtagtaagtctttgaaaattgaactacattttagcacttttttgtttgattaagggaattggaaatgtcattgctgttgcacaattcttactctttcagaatatggggtgaagcatattttacttgacactgaagattctgtttttttgttattgtttgtttttaatgaactctttttttttttttttttgagatggagtctcactctgttgcccaggctggagtgtagtggcgtgatcttggctcactgcaactctgcctcctgggttcaagccattctcctgcctcagccatgaggttctttcactcagcacattgtggacatttttctgtatcaataagtatacttttatatatcttaatgttaaataatgtgtcacaatatggatgtcctataacttatttaactatcccataattatatatttttatcatttttgggtttttttctactatcactagtattctggtgaggtctgttgtagttcagtcttcaggtatagcctaaggaggttgttttttttggtttgtttttaacttggaaggtagatcgcataaaatatccccactctatctagattttaccagccactcaccgcttatgtttgtaagcttagtgtttctggacagatggagtagagagaggaattacccaccatcttgcattcttctccctttcttctctgcattaagaatggcagtgtagggccaggcagcgtggctcatacctataatcctagcactttgggaggccaaggtggatggatcacttgagctcaggagttcaagaccagcctaagcaacatggcgaaaccctgtctctactaaaaaatttttttaaattaaaaaaaaaattagccaggcttgggggcacatgcctgtagtcccagatacttggggagctgatgcaggaagatcacttgcacccaggggttcaaggctacagtgagccatgtttgtgccattgcactctagcgtggatgacaaagtaaggccctatctttcaaaaaaaaaaaaaagaatggcagtgtaagaaaaactatggttgggctcataggaaattaaagtagtctagacaaaaattatctaggtctggtgcataaagtttttttagctattggcttttttttccccataaatattcgtttaggaacttttcacattttaaactcttttctttcataggctcacgacttatttagatgtacagcggtgcctggaatatttgggctatctaggctattcaatattgactgagcaagagtctcaagcttcagctgttacaggtaagtatctagatactgttcagctcatgattagagatattttttaagactccattttcaaatgtaacaaagagtaagaatacactcatcttcattagtcttccatctacactctattagttttccttgtgatcagatcatttcttttgtgttgaggtgcttgattttattgtttatgaaaagaaagaaagtagagactttgcttcaagtctactccctggggttactccactgatgaaaatgaggaagagctgtgggcattaaaggatttaccagttgatcttgcgttttaattttctttaaacattaaaaataatgcgtattaactgttttctgtattaatacagctttcacaaatcttgtaagccaggcattcttgccaagcaatgtgcaccacttaaagtaaaccatatgtatggaaatagcaagttaaggaactgatcatttcaagagtttcttatatccctgttggtggaaaatctgccatatcttatgggaagccctagcacaagaagacagcctttcttaaattgacagagcaggtaccctttaaaatacttaaccaattagacagtatttaattcaacaccagagaataagaaaacagtcactagccagccatgaggttctttcactcagcacattgtggacatttttctgtatcaataggtatacttttatatatcttaatgttaaataatgtttcacaatatggatgttctataacttatttaactatcccataattatatatttttatcattttcggttttttttctactatcactagtatctctggtgaggtctgttgtagttcagtcttcaggtatagcctaaggaggttgtgtttgtttgtttgtttgtttgtttgtttgagatggagtctctctctatcaccaggctggagtgcagtgatgagatctcaactcactgcaacctccgcctcctgggttcaagcgattcagctgcctcagcctcccaagtagctgggactacaggcatgcaccaccatgcccagctaatttttgtatttttagtagagatggggtttcactgtgttggccaggatggtctcaatctcttgaccttgtgatctgcccctgttggcctcccacagttctgggattacacgcgtgagccactgcacccggctctaagaaggtctctttacctcaggaagggatgcttgctgtccctatgatacagcattgttttctggcatgcctcttttacagtttacatttgaaaggacggctaaccccaaagtgtgtgtccctttccgttttatggatccagctccaagagagtgcagatttgaaatagcatcttttagtttataatatgtgacagtttatcacagaaaaaattagatggaatataatgttggctatattcttagtaattttcattcatttataggatattttccttatgaaaatatactattttatgatgaaataaatgtttggttactcgaaattcacattccagtcaactttcagaaatgcattttttccactaactggggcccttctgcattctgtgtacttcattcacatacagcttgactgttgtacaatatgtttgtttatagatcagctacttcataaaaataataagcagcaatgccctattttgcaaaaggtggaatggaggcttagtgaatctaagtggtacatatttagtggggttttttattattattatttttagtgacaagagataaaaagatagacctgcagaaaaaacaaactcaaagaaatgtgttcagatgtaatgtaattggagtgaaaaactgtgggaaaagtggagttcttcaggctcttcttggaagaaacttaatggtgagagttctcgtaaaatacaattttatccaacaaatttttatagttactagtttacataatgttttcatagccattgacctttttagataattattagaactcaatggcctgtattagtcaagtacagtctaaatgtaacagtaatcctgttgaactgtctttgtttcattgatattagctatcatttgtctttttttaaccagtgtttaaatgggcattaaatgactacagatgtgaaagcacctaacacagtccttggcatgaagtaaatgcacagtaaatattttgaattgaatattgatatctagttcttactactcccttgagtaagaagaagaagacatatttcttttcttcttcttcttcttttttttttttttttttttttttgaggcgaggcattgctctgttgcccaggctggagttcagtgacatgatcatggctcactgcagcctcaaccacctgggcttaggtgatcctcccacctcagcccctggagcagctgggaccacaggcgtgaaccaccaggcccagctaatttttgtatttttagtagagatggggtttcgccatgttgcccaggctggtcttgaactacttggcctcccaaagtgctgggattacaggcatgtgccaccacaccctgccgacatatttctagatgggtattaatctcgatcagaccaaattatggtataatgaagattgccagcaggtggctctagaatatactttcagtaatacggatagtttccttcctttttagctactgcttgtactttatgcagaacaaatacatcttttattttaggtcttaagaactaagaaacataaaatcaatatctcctttgtactgataaatagtacacagtgtagggaagaatgcccttttatttataacacacctgcacatatacacagagatgtttgtatattgttgaaaactagttactgcagatattgagattttcggttctgttttcagaggcagaagaaaattcgtgaagatcataaatcctactatgcgattaacactgtttatgtatatggacaagagaaatacttgttggtaagaaattctgtggcatacaaaaattactaattattgggtacatttttaaatgactctttgaaaacaaattggcttcaattgaatgactctctgtagaacttctgtgtgattttttttttatttaattttttttagagacacggtctcactatgttgccctggcgagctcttgggctcgagggatctcccacttcagcctcccaaggagctgggactgcaggcatgtgccaccatgccaagcttgattttattttttttcatctggtttattcattagaattttaagtcttttggctaggcgtggtggctcacgcctgtaatcccagcactttgggaggccaaggcgggcggatcacctgaggtcgggagtttgagaccagcctgaccaacatggagaaaccccgtctctactaaaaatacaaaattagccgggcatggtggttcatgcctgtaatcccagctactcgggaggctgaggcaagagaatcgcttgaacccaggaggtggaggttgtggtgagccaagataatgcctgcctgggcaacaagagcgaaactccatctccagaaaaaaaaaaaaaaaaagaattttaagtatttttatcatgtgatgattacataggtttagatataaataaaaattcatcatttaaaaaaattaaaaaaaaaattaagttggtacacttaattgtatgttagctataccacaataagaaagttgagaaaaatgggttaggcatggtggctcacgcctgtaatcccaacactttgggaggctgagtcaggtggatcacctgaggtcaggagttcgagaccagcctggccctagtgaaaccctgtctactaaaagtacaaaaattagctgggcgtggtggcacgtgcctgtaatcccaggtacttaggaggctgaggcaggagaatcacttgaacctgggaggcggaggttgtagtgagccaagattgtgccactgcactccagcctgggcaacaaagtgagactccgtctcaaaaaaaaaaaaaagtcgaaaaaactgaactccccttttactttcttctacttctatttttttttttttaaattttactttaagttctgggatacatgtgcaggtttgttgcataggtcaacccatcatctaggttttaagacccgcatgcattaggtatttgtcctaatgctctccctccccttgcccctcaccccctgacaggcccctgtgtgtgatgttcccctccctgtgtccatgtgttctcattgttcaactcccacacttatgagtgagaacatgcagtgtttggttttctgttcctgtgttagtttgctgagaatgacggcttccagtttcatccatgtccctgcaaaggacatgaactcattctttatttatggctgcatacttctatttttttaaaaaaatatttcctgtactattgactagaaattaatatgaaaaccctgctagtgcttggtagtttatctgtaatctgaatcaagtttatttagcagggaagggagtatttaacaaatatgttagccttaaaaatgtataggctactctaggcacactgcctatgggttagccctgctctgcaaggagcaataaaatcaaacaaacaataaaaaaagtacaaaagaagagctgaaaagacactatgaaatacagtagaaggagggttatatgggccaggtgtggtggctcatgcctctaatcccagcactttgggaggccgaggcgggtggatcaccctagcctgaccaacgtggagaaaccctgtcccgggctggtctcaaactcctgggctcaagcgatctgcccacctcagtctcccaaagtgctgggattacaggtgtgagccacagtgcccacccctgaattttactcttgttggagatcattatagcatagatggaatatttaagaaattttataataagcaccgaagagtggcagtgaaacagaacaaaaatgaccttactgtaaagagtcatttgctttttgtttttgattagtggggagaaaaggtgtggtagaaagaaaatagatttgagaatcatatctgagtttaaattttgatttgataacttcttagatgtgtaccatgggcagctgacttaatctttctagcccgtctccttatctgcagaatgtaaacaatgcatgtagagggcctgcccccacacattagtcactcactaatactagcttccatagaatcttttttttttttttttttttttttttttttgagacaaggtttcacttttgtcacccaggctggaatgcagcggcgtgatctcggctcactgtaacctctgctttccaggctcaagcgattctcctgccttagcctccccagtagctgggactacaggcacacgtcactgcacctggctaagcttccacagaatcttaatcaccatttttagtctgcagaatcagaagatacttatttgtctatactttcttttttttttttttttttttttttttttgagactgagtcttgctctgtcgcccaggctggagtgcagtggcgcaatctctgctcactgcgagctccgcctcccgggttcatgccattctcctgcctcagcctccctagtagctgggactacaggcacccgccaccacacctggctaatttgttttgtatttttagtataggcagggtttcactatgttggccatgctggtctcgaactcctgaccttgtgatccgcccacctcggcctcccaaagtgctgggattacaagcgtgagccaccgcgcccagccttgtctatactttctacttttaaaactggcctgaaaagttatgcttaaccagtacttttaaacttaggaagtccagggaaggaagtaataagctatcatgacttaatatatcaatattatgatacttatatttttcattatctttttcttttacaagttgcatgatatctcagaatcggaatttctaactgaagctgaaatcatttgtgatgttgtatgcctggtatatgatgtcagcaatcccaaatcctttgaatactgtgccaggatttttaaggtttgttgctcctacagactatgactgaatgtaacttcatatggactttttatggaattgcagtgtggtgtttcctaaccacaaaaatgcaacaaaatcatgtgtattttaaaaatacatacatctttaccctattcctgaaggttctggttttgttctaaagtggtagagtctcagacatacatatttctgaaagttttcgacatgtgattgtgaggtgcattcctgattgagaacttttacattaatgcaagctcttcccagctgttaaaagttacatatgtctgccttctctctgatgaaaaaaaagagtagtacatatggattatatattgccaaatataccaagaataacagccagaggaaagggataaatctgaagcttagaaagtctatcagtcacttagggattatcaataagattcaataggagtaaaaagctatatgtacaaaggtgtttattctagcattgtttttaacaggaaaaaactggaaataatcaagatggctaacaatggacgatgatttactgaagtaagataaaataatctagtggaatgttaggcaatatttaaattaaaaaataaaaacaataaatgtaaaattaaaaatagttttgaattctgaagaatatggaggacacagtattacatttttaagtggttatgtccagcatgactgcgactatacagacacacataaaaatgcatgtgctcaaggactagaggtgatattaaaaaatgaaagtagtttttataaaagaatttaggtggatttctttatatttcaaaatatgtgtgtttaatgtgtgtttttaattacatgttttttttaattgtaataaatctaaggaatcagtataggtctgttttgtcatcagcattggaaaagtgatctggatcttatttattatatgagatttacctagaccactgccaatctttgccttttggttcactttttcgctttgaaactactgttgctttgcccatctggaggaaatgcttggttcacatttaattaaatagtaatttttgaacttgttatcagattttgatttcattttttattccatagcaacactttatggacagcagaataccttgcttaatcgtagctgcaaagtcagacctgcatgaagttaaacaagaatacagtatttcacctactgatttctgcaggaaacacaaaatgcctccaccacaagccttcacttgcaatactgctgatgcccccagtaaggatatctttgttaaattgacaacaatggccatgtatccgtaagtacttgctgtcttcattttcatgttgcatggttcataacattgcatgccattattagccatgaagggaatatctttgtcacataggaattgttcagcaacagaaagatactttgtaatgagaaggtacaaatttgagtaaatgcaagtttggtttgaatgccataataaaatgatataaacagtgcttctgacaatatctgtatatttttgagcaggctgtaactatcttaatagaatagtacaataaaacacaaccccccacccagcattaaaaaatagttttactggaataaaatgggtttggcatcatgttgttttatgcttataaagcattttcatatgaacagaaagtttatatttttctgtttttgaccttaggtatatgaagttttctaaaatattttattaatttatgttgaaattgtgggtatgcttcagttaggatatgtcttttttaagtgctgtaaagagtagttgtaattggaatttctactgtataaatgttttacattaagtgttacgagccacaaatttcatgtacatttattatatatctatacatgcatatgcacaagcacataactgtggtcatctctgtagtttactaactgccttaaaattgcatggttcttaatggcattcgcctcaagtagtgtgtttgtataaattctgttttgtaacaaaatagtttttcaggcagtgcgtttctcaggactttatagcttattctacttattcttatgttagtctctaaattatttttcttcttatgaaaactacagtgtaacacagagtaataatcaaacattgctataaaccaagaatgacatttttcaaaaaggtgttgatttgtacagatttttaaagtcagttaactttactgctattttattacctaatactttttttagatgcaacaaacccttgaatttctatttgtattcgaagacaagtcattcctattattatagaataaccaaaaccttatttatgttttacctttgctttaaaactctcatgtatgttatctacagagaggatcattacagagacagactctcccgagacatgggccacactgatagaatagagaatttgagaaaaatctgggtctttctaaaaactgctttgtaagttactttttctttatgacttctgtgggattttgttgatattttcttagagaatgaccaaatctcctttcttgccataattaacatttagtaattatgtagaaacgcactgcttggtcaggcttcctgcctagctatatattacgttgtcttccttactacataaatgtacttctttaatcttgtgattacagtaactgcaagtgtgtttttacatctgcatttttaaaacattttactgtaattctgttgtgtgtgtgtgtgttatatgataaatgtacatacatggaccacttgtttatatggttaatcccaaactacttctcatgaagcatctccctgttgctaagcatactttgcatctctcctttttggtgggtggagccttgtgtatgttaaagaatcagatttgatttataaaataacagatggattccagtatgacagctggcagagacttagtagcagtgatttgttcatcatcacaagtcaaaaaaaatgaaaaaaaaatgaaaaaggaatgtcttgggcctatacaagtttttttttttaattcttgtttttcttcatattgggaattaggcattattggaatgctgctaatcgttacaaccatgccaccatgtgctgtggtctcatcagatctcataagctaagccaagtcagattgggccagtcttttgactgagaagcctataaaaaaatgttcaggtgttacaggaagtgatgtcattgattcatcaggtggcgctcttctgagtgggttctgaaccagtacctcttcatgggtggtgtgatggctttgtatgaatgagtggctctgaccactgaacagtcattggagaccccctactttggtagttagagccgaggtgaaatgggttgccccctgtgcctgcaccaactagtgcaactctcctcaaccagaaaggagtcagaaagcctccctaaatttcatatctgatttcaattggatccattgttgattttacatccttacccagagtttcatactgtcatatatagctgctgtgtttgggtagcagatgaaatcaaccctatattttatttgagtagaaatttataaagcaccttgatttagttcctttgagagccagggtgcttgatgaattaaagacgttgttgttcacatcttctcagggttgaatacacttgtcttttgactcatttgtatatttatcattcttctccttcctggttttcaggcatgtgtgtatgctgagggaggaggaggaggagggaatcgttatttaaacgctagcaaactttgtccttttggtgggtgcttatggcttactcaggttttctttttattaatttagacgagggtgccatctattgctgtgcatatttattccacaaaaattcatgtaataataattccatcccccctccaaaaaaagcaaaagtatcagctaattttccctagattttctacagggagggaggaggaagctattactatttattatgtttttggtaaatgtggaattctgcacaactttagcatgccccatactgtccttttcctttctacaaagagtgttgcttatgcctaagtcttttttttttaagttggcacaccctgacttgtgccatatttgtaagtaagaactcaactcctgtccttctgtgtgttttcgcagccatgcccggttacgctgtatgtgcacctgcaacaggtgtacattttgcatctgtcagaacttcctcaactcagacttgctgcaatctgtaaagaacaaaatcttcactgcagttcttaacaggttcttaactttatttactgggtaccaggcattctgttaaaatacaaaagaaaaaagcggataactatttattatacagatactcactacaaagacaagctgactgatgcccaactaacttccactaaaattctcactgtgatgacaatgtttagttttggaagcatccttaataatgtttttaaattaataggtatatttagaggactataaaataagattttggatgtttttttcataaggaagataaattatctttcctattaaaagataatatgtatagggaaattaaaattttttggctgtgagttaatagattaggacttttgtagtaaagaaaagacacattaatcctaaatgaaagatattatactgtactcagcttacaatgaaataatatatctcattaaaaccatagtaatgcaaacagtattttgagtttgaaacaatattctattcttgaaaccatttataattataatctgcttttaagtacctggagtgtttatttgaaagaacatggtttctagacatgaggataataaccaactttaagaactcaaaggaatgtggaaaagagaaaaagatctgtagtactgtttttttaggcctttataattgaaccaaaagcatgaagtaatcctataaagtaacacgcttttaagaaagaaagagaaaaaaaaaggatgcatatattccctcaaagcaataatcttggaaggttgtattcttatgctgatcatgctacctttgttcaaatcagttttacattttttgagcatttaagagctgaatactaatttgtacctgatgtcatatgtgtatgcattaggtttttgaaatcatttaaaagtctttgggagctgggcttgattaagatcaagctaaatattcaattttggttagaaatgggtcagttatttggctcaccattggacactcactgagggctagactttaactgtatcaaatgaccatagtttgtatccaccagcaatatagtggatgtgtctatgaaacagtgagtttatttcttctgtgagtcagaaactgattttgaaggcattctgagagtttcagtgatgtttcgagcactaacagctctggaataagaatgcaaccatctcaggtgactgctttgaagggatcaccgcacccatttggtggcaaagttctgcttctgtgctttagcaccttgtaaagtagtaacatagacagattctctcatgatgactgacagaaaatgcaaggctagttcaaaccaaacaacactcaggtgctccagtgttgggaatcgttgagttggaagagattctagaattcatctggcctaacctcctgttagaatgccttcctgcaagccttcctgagagagtgctgtttatctgctgatggcttgcctcattggaaagcatttttgcttttgcttttattatttttttttaactaaatgttttccctataactttctctctttagttttagttctgccctttagaacaacatacgactatcctactccctcttcaacatagcaatccttcaggcatttgaagacggccatcatgtctcccctaattttctcttctccaggtagaacatccccatttctttcagccttttcttaaattagatggtttagtgaacttatcattcctggttgtcttcatctgaaagccccttaggttttcacagtacctcttaaaaggtgccaccaagaatagaaagcagtgttgcagttgtagtgcgactagtccagaacagtgggcagctgtttttcacaattaggacagcatctgtctagggcatgaattaactttttggcagtcccatcccactgttgacatatattgtcttggggctaattaaagtcagatgtttttcatatgaagagacagatgtcccctcctttctgatgtgtatttgacattttttagttgatgctttaaatctaaatgcagatacatatatatctctattaaatgtcatattcttctttttgatccatttgttctagctcagtcatttcaaacattatttctgtcatttgtcccattatatatttctctaagcattgtgttatttgcagatttggtagatatgtactgtttttcaagttactgataaaaaatgatgttgaatacccagaggttggagagagagagagtgctaaactgagcaagccctatagtattccaccagagaactctttgtcaatgacaggttcaaaattcttggggaaggatttttcagtcaatgaaaaatatgttattatccagcccacattttgtcttcctgtcttatcagatatttcatgaaggatttttctaaaatcagtatataatttcttccatattcctctgatctaccaatatcataattttatctaattagcaagcaacatctatttgatgtcttattttggtgaactcaccttggctccccgtaattgctgatcacaaaccacctattttattacctattctagaaactcttgattgtccataattacagattgattcattgtctgtgtccctggtgacaattttattcctagattggtttagttagctttcaaataaaattgatttagttagctttcaaatgaaataggacagatgtgcattaaatgaatactattgtgcatagtaaattatacaatggccctcaaagagaaatcagtacgtttcggtcatatctatttataaactggtagtaatttaatggtgatgtcagcacacatcctgacatctggtaatcaagaatggaaagaatgaaaacgacaagtagaggaaccagtatacttttcaaacactccttccttatccccgttagtatttcaatcatttatttaagagaagtacagtggaattttaggggctgcgtattggagtttcttctagtttatgaaaggtaagtaagataggtaggtgggggccaaaaactcagtgcccacaggtcccggatggatactgtaaaagaatgaaggtggccaagtataagaaacaaggagaggtggggactgtgacaggcactgtctaaaagaggcagccaccactcagctctggccgtttgttgttgtacaggtctggtgttgccaggttttctggttttacaagagactggaaatcaaggctttggtgtgaaatttccagattgttagagattagcaattaattaacaaatttttaagtactaatcagaacaaagcatgtttatagtccaccagcttgcaacctcagtcttaaggtatggcctagtcatgaaaatagaggccaaggaaaaggacacatagaatgaaaatgtctctggtcccatcaccaccaccaccactttactcctttcccatgaaaaatttgaaaaagttattgggtggtgggatgagaatggaaccacctttccctgttacttctcaggttttggcagctgttactggttggtcactattggtttcctgtgttagacatatcctaatgttaggcacaaaaaagattgattgactaagtaaaagtcatttaaaattttttcactgtattttattcatagggagggttctcacctaacactaggtcctaagtctttgtttttagatatcagaactaccatgcttagtgtttgatttagaattgtgaaagagcagttctaaaaggcttgtcttttttttttttttttttttttttttttttgagatggagtctcaccctgccacccaggcgggagtgcagtggcatgatctcggctcactgcaacctccacctcccaggttcaagtgattctcgtgcctcagcctccggagtagctgggaccacaggcatgtgccactttgcccggctaatttttgtatttttagtttcgccatgtctcaaactggtctcgaactcctgacttcaggtggtctgccagcctcagcctcccaaagtgctgggattacagctgtgagccaccgcacccagctgtcatttttatttaagtaaaaagtttcattgaatgtctacaaagaattaaattagtagacaagtattggtctcaaatcagcacattgttttagtgtgcttgtaaaaattttggtcactgaaatagaaattactaccagatatgatacatgtttgagaccacattctcttattaccccactgtcccctaaccccaccttgatgtgatttattcattcagagtacttaatttaagtacctgctttaaataggaacctgctgtgaactggggcaaaatttgaaaatgaagaatatatggaacctgcctttaagcatctttctaaatattatttctctaagaaaaacattttttaactttggttatattttcagtgatgttagtccttcatgctaaaaaggaaagtgctatataacctgataatgaatttaggcagtttcaagaggttaatttctgcaagtgtttttccttttatgagaaaaaaattgtcttttttcctgaacttatttactaacacgatatattttaagtatagaaagaatgaattaaaaatttttatttccaatttaattgaacgtatattaactttgatgtgtgagagtagtgttaaacatacatctatctcacatgtaatctttctcttggtaattatgagctcactcagatctggataggtttatgttttactttagactaatttatgaataactggaattatttgaatttgaatacatgtggaggatgagtaacatgtggtcagatgattttaatctttgggactgctttcatttcaagtggtataaattacgttactggagaaaaagaccttttgaatatattttaaattttaaatatcttttaaatttgaaaatgattatatatagatgagcttgattgttggtttgaactacccaggatttttatttattaagtatttattactctgacttgagaacactcctgctttgcatgagaatgttactagattgtagtgtatcgtgaactttaatttgtccttttttaggtgtttgttttcatttgtttgtttgtgtaacttagtcattttttgatactctcaatctccttcccagctaggtttttgtgtataatctcaccacttctaacctgttatttaatcaaatattgcttattttacagtttattctttgggcgtgatttcctttgtgcatattttggttttaggatttctttcattctattttattatttgcattagccatataagttgttggttcatgttacttcttaagttcagtagcagcattttattttgacaaccaagtgcatagttcacaccgaatatttacagagacccaaaagtatgatggatagacatcatacctattgcattttttaccctatttataatgtatttttagattaaatatatgtgtgacttttaagccactcattaatgacttcatttacccatattgctttaataatcacccaagttcttcctttatgtagtttgaattcattacttaatataggagccctttattgaagaaaggattttattattgtcagacaaaaatgaactgctttttcataggattgccttatgaaaaggataggtttctaaaaatcttaatgttgttaaatgttggaaatctaagagtctttgggatattacgttatagtaaaatattttgtccaaggaagtcctgctttagtttcttatgaaacttatttattcccttgtatgaaggtccttataagactgtttgtgaatttgtatacatagtcatatatttaaagttatacaagagtttatgttatagattttcattaagtaagctgctgctgcttataatttttaaattttttgtcatttggttaatatattaaaggacatgacaaggtgaagtttgccttatctgatctttaagtatcactagttaacatatagatattggagcatttcctttgtattcatgatcatctgtaaattcagattcttctaatgcttggtgaagcatttcttgacattagtgcacacctgtgtcgtttcccaaagtatgttactatttaggcgtgctcagttaacagcttgcttatggtttgtgttgaagctgctagacactgtgtattgattccttaacctattttatcctattaaatatttatcctaatatatgtttatcctaataaatatcctattaaaatattttatgcctattggctcagttaggagaattgtcctttttaaaattgttattagcagtagtggcattatttttaaaagtagatacagaaaatacagccaggcgccttggctcacgcctgtaatcccagcactttgggaggccgaggagggcagatcacgaggtcaagagattgagaccatcctggccaacatggtgaaaccccatctctactaaaaatacaaaaattagctgggcgtggtggtgcgcacctgtagtcccagctacttgggaggctgaggcaggagaattgcttgaacccgggaggcggaggttgcagtgagccaagattgcaccactgcactccagactggtgacagaccaagactccatctcaaaaaaaaaaaaagaaagaaagaaaatacttcaccagattgaaacatttggagaaacaaaagcagagagtccagaagactttttttaatttttaatattttattttatttatttatttatttattttgagatagaatctcactctgttgcccaggctggagtgcagtggccctatctcagctcatcgcaacccccacctcccaggttcaagtgattctcctgtctcagcctcccaagtagctgggattacaggtatgcaccaccacacctggctaattttttgtatttttagtagagacgggtttcaccatgttggccaggctgatctcgaactcctaacctcatgtgatctggctacctcggcctcccaaagtgctgggattacaggcatgggccaccatgcccgtcctcagaagactttttttttaagtggaatatttgaaaatagaaaagggccaagcgcagtggctcatgcgtctaatcccagcactttgggaggcagaggcaggaggatcacttgagctcaggagttcaggaccagcctgggtcacaaagtgagagcctgtctctacaaaaaatttaaaaaaataaaaaaattttaaaacaagctgggtgtgatggctcacacctgtggtcccagctacataggagactgaggtgagaggtttgcttgagcccaggaggtcaaagctgtagtgagctgtgtttgtgccactgtactgtagcctgggtgacacaatgagatcctgtctgaaaaaaaaaaaaaaaacagagctgggcacagtgtttcacactcataatttgagcacttttggagatcgagacagtaggattctgtaagcccaggagttccagaccagcctgggcaacaaagttgtattaagacccccatctctacaaaaaatcataaattagccaggtatggtagcacgcacttggggtcccagctacatgggaggctgaggcaggaggatcacctgagcccaggaggttgaggctgcagtgagctgtgttcatgccattgcattccagcctgggtgatagagtgagaccctgtctctgaataaataaataaataaagacagaaaaatttactgtagtttggtgacctcagtatagttttcaacttgagatacgtaattacaaatgagaaaaagctaaatatggtatctctgtgccctggtaactttagatacacttctattacagttatattggttgttttagggtattatcttaaaaatctatacctgagatatatatatgggtagagttgtaaaattagaagaccattcacattagtgcatttgtacatctcttagttgtattttggaaagaataaggtggggagatgagaggagtgaaaaataggaaattcaaatacatttctgagaaattgtgtgggaagactgataaaaatgactctctggagctcctctgagtaaaatctctcagttttgcttcttttcagtattttctactgaacttttcttttcctctgcataatagcttacagtctaagacaaggttaattgatatctgggtaacaatttctgaattcttacccttccgctatgttgcccaggctggtcttgaactcctggtcttaagcagccctccaacttcagccccccaaagatctgggattacagtgtgagcctctgtgcccaaccagttcatgtttttatattcaccttaagttgcagaattaattaaaagtattttgtatgcccttgcactaaagatattcagtgcaaaggtacataggaattttggccagtctgcatatgccttgtgtgactgttcacagttcacacagttgttcgtttaactctttattacctgaattttgcaacattttcttctctctgcattattaagtagtggccttaataaaacccaagtccagacgtgttggttggctcctacacctgtgtcaaggagaacttgacgtctgatacattaatgggccttcagcacttctaagccagaaagccaacatcccagacacaggaattttcacctaagaacttgaaagctctaacaaactgcgaatgattagttagggttatattcaacatttagtcattatttctaatgttctaaaaagagatactgcttaactaaatgatcttattccacatagagtaggaaggtttggtgattttgatatatcactaggttagaaaaaaaacctttatacatagacacacgtacacatttttgaccttgtaacatttaattctggaaagtctatcttaatgaaaacatcctaaatatagagaaaaattttatgtagaaagatagtcttttttttgtagccacaaataaatggagatagccaggttgggcatggtggcttatgcctgtaatcccagctctttgggaggctgaggccaggagttcaagactggcctgtgcaacatagcaagaccccatctctacaagaaaaatgaaaattatccaggcatgatggcacacacctgtagtcccagctacttatgtggctaaagcaggaagatcacttgagctcaggagttcgaggctacggtgagctaggattgcaccactgcactatccagcctgggtgacagagcaagacgctgtctctgaaaagtaaaataataaaataaaaggagatagccagcaataggagaatagaatataatccagctatttagaatgtttccataattgatgaagaagtccataccttataacacgtgtgaaaaatatatagaaatatacacacattgtgtttgcagctgtgtaaaaaatacatagaaaaagtctaaaaggggctgggcacagtggctcactcctgtaatcccagcactttgggaggctgaggcagacagatcacttgaggtcaggagtttgagaccagcctggtcaacatggtgaaaccccatctctactaaaaataccaaaaattagctgggcatggtggtgcacgcctgtaatcccagctactcgggagactgaggcacaagagtgactggaagctgggaggtggaggttgcagtgagctgagattgcgagactctgtctcaaaaaaaaaaaaaaaaaagtctaaaaggaaatacctgaccttttaatttgttgccttgggtaacataaatgattttttttcttactttgccttattttctaatgagtgtatattagcttttttatatttgaaaataaagtaaactttagaaagaaaaactatgcagtaagatactataagttattctaagatgatattttctataagtcattttgaaagaattatgcttttgaattgtggaagaattatttctgcttaagtttagaaatgagccagaagcggccaggcgtggtggctcacgcctgtaatctcagcactttcggaagccgaggtgggtggatcacctgagatcaggagatcgagaccatcgtggccaacacggtaaaaccctgtctctactaaaaatacaaaaattagctgggtgtggtggcatgtacctgtagtcccagctacttggaaggctgaggcaggagaatcatttgaacttgggaggcggaggttgcagtttgctgagatcgcatcactgcactccagcctagtgacagagtgagatttcgtctgtctcaaaaaaaaaaaaaaaaagaaagaaagaaatgagccagaagctttatgaaactgtacttgcctctgtttgaaaactgaaaggacaaacatgaattagtttttgatacttttggaatacatgtgagaccacattattctctattcaggttaagcaatgataagcgtgccctccattttaaatgctttctcttttataaatagagcctggtagtgcagcctttaaatgcaggtggtacaggtgtaaaatagttctgtaagtaactttccatgtctaaaagtgtcttaaacagctactgtgacattgatggagccatcgaaatatattttataagttaatagttaccttaagttttaaactagctgtatcttgaacatgtatctatattgatcttgaaatgcaaaagaaaactaagcaataaggtcagtcagaatatattatttcatgtgtcttaaaacacaagggagaccagcctgtagttccagcagttagagaggccaaggtggaaggattgcttgagctcaggagttcaagaccagcctggacaacatagtgagacttcatctctatcaacaaacaaacaaacaagaaaccacatatctgtgaaacagatatctatatttgaagactatctatgagaaatcattttgattgattttaatatgattatagctagcttaaatcctaattcttttttcctcctaagttaaaaaataaatgtaaaaatgtaaaaataagataaaaaatctccatcagtgcagatgcatgataatcacagggaggccaaagatgaagagaaacctctaatgcacctttacctacgctctgactttaaattctatgcatctgcattgacttggagttgtaaacttctgttactctcatcataggtccatggcggtctgtgagtttgggatgttggactcaattttttcacagatatatatttgtagtttttgataacccaaagttataatcatctgtaaacttcacgactaatcgttgttaacctcatttctgttgaatacttatggttactacgtgttgtcaggtactgcttatggtattggtttaaaggacttggtatttcagatgcaccaagaccagcctcatagggatgtttagagaatgtatataacagctttaggtttccttgtctggagtgggtgtgtgtgtgtgtttgttaacagagtacatacagatagattttttttttaagtttggcaatttgctatagaatacatttattttaaatatagaaaacatgagatccatcatatagggtggcaactcaatttatgtgtgggatgcataattgagagatgttattttgagtccctttttttgtgagctctgctgtgaactgcaaactgtgtgcatgtgtataaaaggttaagagcccggatagctgagtggggtgccatgctgttagcagacgatgagggcagtattactcaccaggtgcatgctgtcagctctgtagaagattccatcttcatggagtcatctcatggtccactttttcttgaagccaggtaacatttccaatgggttggcctcgttggagtttttccagcttgaaaaacctaagcattttcttctctgactttttttttaataaaatgctgcctgttggaaaaactaacttgcaagctggaatgaacctgtgatatcactttgctttgtaagaaataattatgtgaggagtgattttttttttttaaatagaaactggtgagggtgagaattggagtgttgtgtcttgctttgttgtgttaagcatggagcactctggcttgtgttgtagacttttgtttctagggatgtacagactattttgtgataactaatctgttctctttgactattactgaggcaaagtagttttgtgcagtttgaattcttggctcttaactcttttgcatatgtcagtgccttggtcttttaatgatatctgacttttgcttcaaatctgtttaacttagttataaaataacctaaactagacagtctctctaagctcttaattttgtaagttttcttttctttctttttttttttttttgcgatagagtctcactctgtcacccaggctggagtgcagtggcaccgtgtcggctcactgcaaactccgtcttctaggttcaagcaattctcctgcctcagcctcccaagtagctgggattacaggcacccaccaccatgcccggccactttttatatttttagtagagacggggtttcaccatgttggccaggccagtctcgaactcctgacctcaggtgatccacccgcctcagcctccgaagtgctgggattacaggcatgagccactgcacccggccaattttttaagttttctacatcatctcaattgtgttcacttagtaactaagacttcagtgacatttaaataaaatgttctgaccttttctttagagctttatcctcttcatggtaagctgtcatacttgagactcttgagggtacttactgagcatgctcacaactcagtttgtggtacaggctgtccctgttcttgtcatgcatactatggcttattttatgtcattgcctttcaatccatcacattacgttatgtctgttagttggtatcattatcactgcctgtctaacaccagggattggtttttttctctttaattagcagtaaccaaattaatgcaaactgataaatcttcccctcccccttcgggttttttggggggttttttgtaaatttttatgaggctcagtgtttccaaagttgactttaatcatttctcttagaaaagtattgtcacttgtcacttaactgcttacaaaatagctttcagttcctggggataggagattgcacattatttaaccatgaatatgatcctcaaaattgtgggaacaccgccttaattttcattttgaacaaccgtaacggtattataaaatgctagattgatttgtctaacttctttatttcctgtgtgaaaaaaagtttacaaatttagatgtctactcccacaaagtagctaattgtctttattagtatctacattgtgtcattttcttaaagtaatgattaagtaattatatatatggctatattgatcaatgtttttgataagcattactgtatgcagttagcttgacaagtgtgctaatacttccctaaaagtagactgctaaataactggtatagggttttcatactaatcatgttttaaataataattatattttctgactgcaggcacgtgacacaagctgacctcaagagctccacgttttggcttcgagcaagttttggtgctactgtttttgcagttttgggctttgctatgtacaaagcattattgaaacagcgatgatataaaaagaaatactgtccctaccaaaaacaaatacttttatgtacattctgaatgctttaagttctgctagaattattgagatatttatacatgcagagttactttattaatatttgtaattcatgcataagagtattttaatgatagttataactgcagtattggctagcatatggaaagaaaacagctaacagccaaactaaaatggctaaattccagaggccaaaagggaatattttgtaaatatatgtacatattcaggcaagatatggtctcccaagctgagttctagaaatgatgtttctagacatttctaagtggtattgttagtgctcacttggctcactcttctaggtttaagttagcccagagattgtatttactcatggatcactttatttatttcacatttactcagaatgatcctttgggttctataaggacataaggtacaatttgccattgtctctccatttttaaaaacatacaagtcagtgtcagcttaccaacatgacattttttcagtcagttgtggtaggccagccttgaagccatcgcacagtctagaaacttgtgtagctgagtgtgcagctcacctttaagggtgaagttaggtaaaagcaattagcagaggcgttatctatgtgattatgttgcttccttgtcagtatgttgaattttatagccctttcaatgaaataaaaaaaaaatttgtatattaccaatgtttttagtttaaataaagagtcacccttactactgttgaatttcatcccaagtgtaaatcattctataatggctgtgtctgttatagtatattacagtaactgcatgtgtcaccaagtgttctatatcaggctaggataacctagaggcagtaattttttaaatgataaaataaatctaatgaatataaactctcatgataaacctattttttccatcatcagccttttcaagtatttaaataaataactgctgtgtactgtgatcttgagttcttttgtcatctaaagtaaatatttctgtacagatgtgagtgaagtcctctggtttctatctctcatattgaaaattattctgtataaaaggaatactcagccgggagtggtggctcaatcgtgtaatcccagcactttgggaggccgaggtgggtggatcacctgaggtcaggagtttgagaccagcctgaccaacatggtgaaaccctgtctctactaaataaaaaaaattagctgggcatggtggcgcatgcctgtaatcccagctacttgggaggctgaggcaggagaatcgtttgaacctgggaggaggtggagattgcagtgagccaagatcacgccattgcactccagcctgggcaacaagagtgaaagtatacctcaaaaaaaaaaaaaaaaaaaacttattaggaaaaaagtcaagtatgatttatatatgtaagaggaaatttatttaaaagttgtagagaaatctattctggtaaaaggccaattgttttccctacacatagctaattaatgtggtttctgctattgtttgcatgtttattttctcctttaacatgatttttcctctttgccattctgagggacattttcttacaagatcacacttcttgagcaactagtaacagtatagcttactagctggcaaaataacatgacacttcatttgttatttgttattttttgataaggtcttactctgttgctcaggctagagtgcagtggcgcgatcatagctcactgcatccttgaattcctgggctcaagtgatctttccatctcagcctcccacagtgctgggattacaggtgtgagccaccacacccggcctgactcctcattttttattattttctgagaatttcccacttaccaaatttatgtcagttgtatagtttgcaatgacagttaattttttccaagttcttttctagtttgtctgaaatactgctttaaatgaatatgctttatagattgttgtgtttgtgagaagcagaggtaagaagctagcttaccaagagttaataagtggtgtgtttatatatttagatattctctctccatcttttcatttggggagcttacatttctttggttcagaagaaggcagggggcagctgccctatcttgcacttgctctggacacacccccttgctaagctagcccctttcctcacttgtcaatcactccaggtggggcgaattagtagagggaatgcttactgttttctcatctttaacctacaggcacatatgggttttttctttcttttggagacagagtcttgctctgttgccagggctggaatgcaggggcgtaatcacagctcactgcaaccttgaccttgtgtgctcaagcaatccaccctcctcagcctccaagtagccggggctacaggcatgtgccaccacacctggctaattttttaaaaaattttttagtagagatgaggtctcactctgttgcacaggctggtctcaaactccagagctcaagtgatccttctgcctgggattataggtatgagctgggattataagtatgagccaccaggcctggcctatttttcttcattttgcatccactttagagactagtgaatgtgagaaaataatgtgaacacaagaaaaggctttttctggcttttacagtttactcaggagatgcaagctttaagagtactaaggagaaataaagaaaataggaacttgagagtcgaaaggagatctttcactttacaccagttggattgtcttttttttttttcttttgagacagagtcttgctctgttacccaggctagagtgcagtggcacaatcatggctcattgcaacctcagcctcccgagtagctgggactacaggcgcccaccaccatgcccggctaattttttttttttttttttttttttttttagtagagacggggtttcaccatgttggccaggctggtctcaaactcctgacctcaggtgatccgcctgcctcagcttcccaaagcattgtcttttattttttatttttattttttcaacatctaagtatttattaaggtgagtttttacaaacaagcatctatcccagtgtgcggggtgaggatgggagaggagagtggggcagcaggaagatgaggattctcatcttttgataataaagctccaggttcatcccattgtggatttcatagtcccccagagacacatggtccttaaaaattgtgtaccacttcttcaggacaatcttgttccaacgggtgccagtttaggctgcaatcagcttcttaaggtccccgatggtatcatccgtgttgcatttaacgtggacctttttccccagacggtcgttgcaaacaacctcgatcatcctagctggagctcgaattgccttgcatcctagctagagctcaaatcgcctggaatctgtgaggccactagctcctcagcattgtctttcaaatgggcaattctgaggctgcagtgccttaatgaataataaggcagttgtgtgaagaagcattgctttgaaggtttgtagtcctagcataatgtagtaactatatcagggatctgttgcttcttgctattcatgtctttctctttcacatttgaccaaaaaatgagcaatttctcgcattgttggcactgataatgctacggtaggagtgggctctgatattaggaatttggggagcacatgaccattctgaaatggcctatgaaagtggtaggaggactttgggtatcagtgcatatatgcacatcatctgccaggggaaggcaccaaagaagaaatatactgatgaggctgggcacagtggctcatgcctgtaatcccagcactttaggagacgaaggcgggcggatcatttgaggtcaggagtttgagaccagcctgaccaacacggtgaaacgctgtctctactaaaaatacaaaaaaaaaaaaaaaaaaaaaaaaagccgggcctggtggcacatgcctataatctcggctacccaggaggctgaggcaggagaattccttgaactcaggagctggaggtttcagtgagctgagatcacaccactgcactccagcctgggcaagagtgagaccctgtctcaaaaaaaaaaaaaaaaaaaaaaagaactatactgatgagccagtcttgaatgaaatgagaactttcccaatctatgaaggcagctgaataatgaataaagagagggaagcagatgtaagtgcccgatctctgtggtagagcataattctttcctaaacaggccctcaaaatgcacctggggttggctttttttttttttgcctatcattggctgttaggttagttttgatgccccttttgtctgaattgcactagtaaaagtcagtacaaagatgcctttaaaatatatgtgcaaatcctaaaaataagtgtgtaatctagttccattaacatgtttatttgacttcatactttaatatatcttattttttatttatttttttaaccaacataccagattcctaaatcatactttcacagtccacgtgtttttaggaaactgatttgggactagatactttttgagaaataccacgtcaagatgctaaatttaatgttcacagtatgagaatgacccatgcaggcagcttgacctttccaatgcctttatccccagatctacagtccaataacacacttatttaaacccctaaggttgcaagtaattcatgtctttttaactctttttatcaaacattgctgtcagtgagagcgagtgtctgttaacctgcttggccctcagctctgtggaagtctgacctgtgagtatcacagctgtgtatctcaggtttctctagtgcatctcagtttcataaaatatcctcttgctcccatggcactcagacttgtcagaccatttgtcccagatattttgggttcagaaagtatcttactagaaggcaagattttattttatttgagacagagtctcccaacggtgccactcggctcactgaaacctctgcctcccggcttcatgtgattctcctgcctcagcctcctgagtagctgggattacaggcatgtgccaccatgcccagctaatttttgttaccacgcccggccaattttatcttctttagcatagacagttgcagaggtccaatggcgaaatcgagagattgttagtccttctgggtttgaaagctgaatgtcagctgtgtacacacaaggaggaattgccagtatcgttttcatacattgaaaattccaaattccgcaagaacagtgtgtttctctttcagcattttcctatttatagtttacatataagtgttttttatttttttgagacggagtttcgctcttgttgcccaggctggagtgcaatggcgccatctcagctcaccgcaacctccacctcccaggttcaaatgattctcctgcctcagcctcccgagtagctggaattacaggtgcctgccaccatgcccagctaatttttgtatttttagtagagatgcggtttcaccatgttggccaggctggtctcgaactcctgacctcaggtgatctgcccacctcggcttcccaaagtgctgggattgattacaggcgggagccaccgtgcccggcccatataagtgtattataatcaacccttaggagttttattaggatgacatgaatgtgtatactgcagtttaagttataagtcgcaaactttttctgcaaagggccagatagtaaatatttgagactttcacaactactcaactctgttgtagcatgaaaacagtcatagacaatacataagcaaatgaattacttcattctaatgaaactttatttatggacacagaaatgtgagttttgtatcatttttatgtaccagaaaatattcttattttgattttcttaaccatctaaaaatgtggaaactagccaggcgcggtggctcacacctgtaatcccagcactttgggaggctgaggcgggcacctgaggtcaagagtttgagaccagccggtccaacatgatgaaaccccttctctactaaaaatacaaaaattagccagacgtggtggggcatgcctgtaatcccagctactcgggagcctgaggcaggagaatcacttgactccaggaggcagaggttgcagttagcccagatcacaccattgcactccagcctgggtgacagagcaagactccatctcaaaaaaaaaaagtggaaaccattcacatgctgtacagaaactgacagtgagccagatttgataaacgccccctgtaacggatgaaaatatagtagtaaatgcacagcagcatttactaatgatttaaaaaaattacctgattgttttggaatgtgaaaagtttcaatactatgaagaacttaaaaatactgtagtcatgttttgtttgtatgaaaactaagagtggatgtaggagttgtttgatttttttcacttttactgatcatattgtttataagagcacggtgcgccggccaacgtggggttaacctcaaagagcagtttgatgcttagaaggtaaagggagcatcaattccacttcttctgaggactcacgtggaactgttcttttggcactttatctatgcttgttttcagttttccagttgtataattggtatacatggaaagtaaaggaatcccacgagaatgtttagtttgaactctagttatctggggaatttacccccttgtgtgcatgaacatgtgatcatgcttcttatttctttaaattttaaagccaaaatttcagagcttagatagcttacatagtataaaggtcatctgtccaactccatactttcatagcgtacagggagcacaaaaaggcgagaagtgacagctcggtgcagaggctcacgcctgtaatcccagcactttgggaggccgaggcaggaggatcacgaggtcaggagatcgagaccatcctggctaacatagtgaaaccctgtctctactaaaaatacaaaaaattagccaggcatggtggcaggtgcctgtagtcccagctactctggaggctgaggcaggagaattgcttgaacccaggaggcggaggttgcagtgtgcctaaatcgctgaactccagcctgggtgacagcaagaagtgacttactcaaagccacagtattagtttgtcctcgagctaggactggaacctaggtatcttgattcccagtttggtactccttccactgtaggagccaacctaacgactgggcttttgttcctacctttggtagatttgcaatatagtctgtgaaaaacaataacaacaacaaaaaaacaggcctaaggggaaaaagagaaagaaagaaaaaccccgctaaacagttttgacatctctataactaaaaagggttaaagttggcaaagcaaattttctggaagcctttcatttcctctgaggcattctgccttcatttctgctagctgtcactaggtaattgatgtgtctattgagaggagtgcagacacgtggttaggtttatttcaggtacagataactgaggagaagtaaggatataactactctttgaaaagcactctatgatttttaattgttcttaagttgttaattttgaaaaaatactcttaaaatttattcacattttataaatggaaaagtacttgtgtcaggggctttgatgggggagaactcctagaataaagttttgtcactaacatttttcatctctgcttctgtaatctgcctccaggatttctataattccagtggcatccagccacttctatataccatctagagaatgagtggctgaatatgtcttcacacattcaccacactttttactgacttcctcttacatcttttttttcttttcttttttttttttttttgaaatggagtctcactcttgtcgcccaggctggagtgcaatgtcacgatctcagctcactgcaacctccacctcctgggttcaagtgattctcctgcctcagcctcccgagtagctgggattacaggtgcccaccaccacgcccgtctaatttttgtatttttagtagagacggggtttcaccatgttggccaggctggtctcaaactcctgacctcagatgacccgccctccttgacctcccaaaagtgctgggattacaggcgtgaaccaccgcgcccagcccctcttacatctcttacttttcccccagattctcaaagtgtgatcacatcacctgggaatttgtaagaaatacgattttcaatagcccttcccccacccccaccccagacctccaagactctgaggcctcagaaacttggaggatgggacccagcaaaatctgtgttaacaaccatcaccactacccaccccctaccctgccctgcgattcagatgcacgtgaaggtttgagaactgctgcagtagatattgaaggagtcaaagaggttacaatctttgggggcaacaaaactataaatttgctagcagtacagtggttaaaatttttaagagaaattatacatacgaataattttggtaaaacaatagaacaaccccttctatgtctccctctttcccctaggaaaattccaattcaaatctcaaggccctgcagacccagacccagacctttgcagccaaatctgcactctccctatcctactacagtctaaccacagagaacttccttcagttctaagaatgtaccttgctcattctcttgagccctttgcagatgctttctctctagaagcctgtcctcccagctcttcatcctttaggtctcaaggagggccaaggcctggctgtcagcatccaggagctgagccttggcatttagtgctcatctatccacttcatccccctgtgcacagtatggcacccctgccctcacctgtgctttgtccagtgatcctctcttggccctctctagagattccattaaagagtgttaagcaggggagggatatactagtcaggtctcagcaaatgtccttttccctgaccccaaggaactgaacctggggaagctaacctgtctccatcctacccagtactgaactaagtactggacctttgcacctgcctgtcatgcacttgcctactcttagagtacctagggggatgtataccaatccgtttatttgtaatttcattttttttttttttgagatggagtcttgctgtattggcaggctggagtgcagtggcacaatctcggctcactgcaacctctgcctcccggattcaagcctttctcctgcttcaggctcccaagtagctgggactacaggtgtatgccaccacacctgggtaatttttgtatttttagtagagatggggtttcaccatgttggccaggatggtctcgatctcttgacctcgtgatccacccacctcggcctcccaaagtgctgggattacaggcgtgagccaccgcacctggcctgtaatttcattttcttgatttacacaaccctttcttgagaagcagctttactcagtcactgagtccatgtggaaagaactgactagcagccctggaagctaaatgatctcttagtggtagtggaaattcactagattatgggttggggagtagtaaaggattgagttaagagctaagatctgagtttaaatcccaactttgccacattctatgtgcaagttacttgaactttctatttccctcctaaacaatgaagattgggattgtgcacatttactgagatctgttcctggggggtgttatttccccttccccttgtcaggagaataggaggtctgcatcccatataaagacccacaggatggcaaccctctgcccttcctcctgcacttgagcagagctgcaccactgtgtctggagagtgggagaggcatgggtggcagccagttttttctcctatatgtatctgagaaatgtcttgcttctcttgagtattggagctgtcttagcctattcaggctgccataacaatgtaacaaaataccataaactgggcagcttataaacaacactaatttatttctcacagttctggaggctgggaggtccaagattaaggtaccagaagatgcagtgtcttgtgagggctcgattcctggttcatagatgtcaccttctcactgtgtccttacatggtagaaggggcaaaaagttcccttgggcctattttataagggcaactaatcccattcatgagggctctaccctcatggcctaatcacctcccaaaaggcctcacctaatactgtcaccttggaggttaggatttcaacataagaaattggggtgggggggatatattcagaccatagcaggggccaataaaatgtccctcacccctattgtcttggcaggcagcacaaacagatgagtttccttatttcactggctcctttctcagtcttgtgggctgcccgacctctgctcaacctctaggatactcgagtaccccaaggttctgtcctgagtttccttatctttcttatctagactttgtctctaggtgatctcattcagcaccttgattttgattttttaacttttttttttgacagggtttcgctcttttgcctaggctggagtgcagtggctcaatctcggctcactgcaacctccacctcctgagttcaagccattctcccacctcctcctcctgagtagctgggattacagatgtgcaccaccataccaggctaactttcatatttttttgtagagacagggtttcgccacattgcccaggctggtctccaactcttgggcttgagcaatcagcccaccttagcctcccaaagttctgggattacaggcgtgagccatcgtgcctggccctgatttttaaactttttatgttgaaataatttgaaacattaaaaacaaagttacaaaagtaatcataggacttgctcctttggggtatttcttataaatggaatcgtacagcctgtggccttttgtgactggcttatttcacttagcataaagttttcaagactcatccgttttgtagcatataccagtactttactcctttttactgctgaataatattccattgtatggatatgtcatattttgtttatccattcttcagttgatggacattgggattatttctaattttttactgttatgaataatgctgctatgaacatttgtgcacaagttggttttttcattttcattttgtgttttgtttttctgtgtacaagttttggtgtggatgtatattttcatttccctagggtatatacctgggaatggaatggctgggtcattgagtaactctgtgtttaatattttgaggaaaagccaaactgttttccaaagtggccgcacatttcacattttcaccagcaatatgtgagggttctagttcctccacttcctcaccaacacttacctgtcttggtttttgtaactatttaatagtgaatgtgaaatggtgtcgctgtggttttgacaattgttgatcttgcccagaacatttattactgcagtatttcccaattttctacttcagttattccccctgtatttattaattggagttatacagtaaaggagaagagtgtccgtcccccattgacttatttatttatttgatatttatttatatgatggatatttactatttactttatcctatgggtcataacacattactcttttcttttttttctttttttttttttttttttgagatggagtttcactctgtcacccaggcaggagtgcagtggcgtgatctcggctcactgcaacctctgcctcccgggttcaagcgattctcctgcctcagcctcctgagtagctgggactacaggcatgtgccaccacgcccagctaatttttatatttttagtagagacgaggtttcaccatgttggccaggctggtctcgatctcctaatctcgtgatccgcccacctcggcctcccaaagtgctgggattacaggcgtgagccactgcgcccggcctccataacacattactattgttatttatttcgttgttcagttttgctcatcctgttcttatcctagattgggccatcaggagctccttcaagctggcccctgcacccgtcaacatgtgccccattatttctgagcacttccttatttctaggcatcacaagatgttccaagcaacttgtttacttcccatcctcatcctgtactttacttgcccttgtcccaacatcaaccatttctccaggaactctggttcctttgattagagaatggttatttagaaacaaagattctggcattaggtgtagctcgttgctactagcagcccctggactttaaatacaatccagctgcaactcctaaattgctatcaccagccctgtcctgattccagaaatctacactctgcttctagtttattatttttttcttttctttctttcttttttttttttttttgagacataatcttgctctgtcacccaggctagagtgcaatggcgcgatctcggctcactgtaacctccacctcccgggttcaagcaattctcctgtctcagcctcccaagtagctgggattacagacgcccgctaccacgtccagctaattttttgtatttttagtagagatggagttttgccatgttggccaggctagtctcaaactcttgaccttaggtgatccgcctgcctcagcttcccaaagtactgggattacaggcgtgagccaccgcccccagccaactgattctagtttcttgcctgttgtttcttcatggatatctgaagcaccttaaacagaacccttcgtacccagcagtaactgcccctttcccgatcgtccctgtcctgttgactctacttccaatacatgtatctgtctacttatctccatctccactcctaccacccagggccagcccatcacgacttcccacctggaataaatgcaggataacctcctaatggctgcagcagtttcccagtttcttcttttccttccaaaatccattctctttaagcagccatcttgccacccctacacttaaattctttcattatcttcctgtcacacttaaataaaacccagtttccttgtcctgcttttttatttgttattttatttatttatttatttatttttgagacggagtctcgctctgtcgcccaggctggagtgcagtagtgcgatctcggctcactgcaagctccacctcccaggttcacgccattctcctgcctcagcctcccgagtagctaggactacaggtgcccaccaccatgcccggctaattttttgtatttttagtagagacggggtttcaccacattagccagaatggtctcgatctcctgaccttgtgatctgcccgcctcggcctcccaaagtgctgggattgcaggtgtgagccaccacgccttgcccttgtcctgctttttaaaaccggactgcgctgttccttgcctgcttctctgaactcactgtttccagacctattgcctgcttccttcagagcctttgcactggctattctctgcttgaaacactcttccctctttttttaaaaagctgcctcatgcttgtcacttaatctcagtttaaatgttacctcctcaaagtggagcctttccagattgtgtaaagaaaccatctggaaactcaatgtgacagtcgagtgtggtggttcacacctgtaatcccagcactttgggaggctgaggtaggtggatcacttgaggccaggagttcgagaccagcctgaccaacatggtgaaaccctgtctctactaaaaatacaaaaattagctgggcatggtggcgggtgcctgtaatcccagccactcgggaggctgaagcaggagaatcacttgaacccaggcggcagaggttgcagtgagctgagatcacaccacctactccagcctgggcgacaaagcgagactctgtctcaaaacaaacaaacaaaaactctatctgacatcaccttgattgtcagcatctcaccaccagccatcctccctccctccctccctttcatcctatctcgttacctcccttccatcctccctccctccctctctcattccctccctccctcccttccatcctccctccctctctcgttccctctctccctccctccctctctctttccctctccctccctccctcccatcctctctccctcccttactcccttccttcctccctccctcccttccatcctccctccctccttctctcgttccctctctccctcccttccttccttttccatgtgtgctccttcatttgttgagggtctccctcctgcttcaatgtaggctttataagagtagggctttgggccgggcgtggtggctcacgcctgtaatcccagcactttgggaggctgaggtgggtggatcacctaaggtcaggagttcgagacaagcctgaccaacatggagaaaccccgtctctaataaaaatacaaaattagccaggcatggtggtgcatgcctgtaatcccagctactcgggaggctgaggcaggagaattgcttgaacctggaggcggaggttatggtgagccgagatcgtgccgttgcgctctggcctgggcaataagagcaaaactccatctcaaaaaataaaaaatgaaaataaaaaaaagagtaggtctatgactgtcttaatcaccactttatattcagggcctagaacaatacttggtacatagtcgatgctcagtaaatatgttttgaatcaatgagtaaatggacaaataaatgaactttaagccatttgccttaaaactctatgaaagtcagtgcagcttattggactgagtgaggaaataaagctaaaggacaaccaaaatatttcctgcagagctggctccaacaactgagctgtggggaagtgcgtccacaaaatcaatgacacaatgtcagggacttgcacaattcagagccaggggtcacaggcctcagacttggggtctgagcctttcttcaagtcgtctggtcaactaggcctcttggccagggctcagtgatctctcttctactgctacacttagtttatcacaagggattctgttctgcttggtcattctttccttcagaaacatgtacttggagcctcctttgtataaagtgctgggctgtatgtggtgagaaatagagatgaaatagttatgggggagatgcctgattcaaagatcttccaatacaatagggagaggtaatatgtaaataagcatctactataggtagaaaaataagacctataagagataaaatcaagtgcaggccaggcgcggtggctcacgcctgtaatccctgcacctttggaggccgaggcaggtggatcacctgaggtctggagttcaagaccagcctggccaacatggtgaaaccccatctcgacaaaaatacaaaaattagccgggcatgatggcagatgcctgtaatcccagctactcgggaggctgaggaggcaggagaatcgcttgaacctgggaggtggaggttgcagtgagtcgagatcgcgccattgctctacagcctgggcgaaagagcgagactccatctcaaaaaaaaaaaaaaaaaaaaacaaatgcaatgggaattcaagcagaggggagattttctgctgttgaggagctcccagaaagcttttatggaggaggtggtgttcaccttgccccataacaattcatacataaagaatatttagttagtttcatttggcctgaaagaattcaggtacctgtgtgcctcacgcttctggggctggagatcagtaatcacttcactggataaatttcctccagtttggtatgtaaaaattgagacacatactttctataaaaactgtcaaagtacagctgaatttgaaaaaatatgctgtgtaataatgtgcttggaacagaataggtgttcatttcaagcagcatgaacgctgtgctcacctgttatgtgtaagtggcagctgaaacatgtaccagattataactctgccaccagccaggtgcagctgtagcatcttacattgtcatcaggattcttccacattttaggatccacgttttgggagtgagagttactgtttgccaaaaatgacctcccaagcccaaatgaagaggacctactagcgcagcagtcagcgagaaagaattgggagatgcctgtcactggcagagagagccttccttatgtggtcaggaccatggaaagcccaaagccaagggacctgggaagtcagccaaggacgcttgcctgggtgtctcctggctggtttctctgtgctgtggagccacctatgtttagaacctcttgccgcgctccctctgctgagcttatatttatgctagatcaaatgtttaaactgcttttctctttgtggatcacaaattttagaacagaaaatgcgggttccggagggtgtgagagacagggacaaccatatgtattgcttcagtagatgcttcagagaaagaagacacttagttctctagttgttcacccaacccaatacggtttctgctccttaagctacattcctataaagattagctttcagctgctaccaccaagaaacagttcaagtgctgcttatgttgtattttaactaaagatctcaagaacaaaaagaaatccctagatgctgacattccaagcaaacttaggtcaggggtggaggcggggaattgacagataaagatttcggtgagcaggcagttctcaccttaggtgagttcacagtgtgcaggggtgcttggtgggatggtatccatttctttcatctttgagagatttaaggggtgcttacaataaggggatacccaatctgcctatcctgacacattcaacacgagttcttaaattctcagctaatgggttggattcccattcattttataggcaggatggctctatttggatgacccttctcaaaaagtaaaaacaacaaaggcaaataaatccttccgagagagagtatgaggctatggcagacaaggtaaaatgcctgtcacaggagataaattattttgctcattaacaagtcatttgtcctttgatttctcaaagccctagagaaacaggagctcagctgacaatgacctgaggggacccctacagtgcttcaaacagtggatggaggaggagatgccttcctggttaagaaattatccctgagcccttgtagaggacagtccagcacaggaaattctggaactacaagatgaaaatgtgtgccagcatgcttctactttcagggtacagtctgaggccctagggaggaggagttcctcaagtgctttgacctcttgccaggacaaagacggagaagtatttagaagcatctgaatttgttagctcttcagttttcctcctccactccctaccctgcacacagagcctcagaaggacagaccagcttcacccccttaccagcaattactgaagaatcacaccccacccacctcaggatcactgatctccttcctatatgggaaccctgacccttggagaaaaaccgctgacctacaaactccccacattcacctagagagcaccagagcagagttctgagtgagataagcagtcctttagggggatctgtttttccagctctcatttttccccccttatttcctttatctctagaattctaagagctgtactgttcattgtttctacccatcattattaagggagagatatggaaacattcccatggtaacagtttcatctcaaaatatctgaatgctattagctgcctttccactccagggaaaagatgagatttttttttaaaaaaagaaatctttattctcaggatatagttgacaggtcctctccacactgcagggaggcctgcccagatcagtggagatgggaaagggctcataaagccaaatttgtttcttagctgacttcacttcctgaacatttcaaaaacttattattacatggttctgacaccgacccagagaattgctggtggaagtactgatgaaaacaccaacatctctgggggaagtcatcaactgggagcatatgagatgggccagcacagacttggctcaaagacccacagaccacactgtgttactggagagcaacaggtttgaacaaactcagaggtatgcgctggttgccatcagaaagctggggagagaaaatgggataggaagcgttgtacctcatgttcatgacacgctttatggctggccaagggcttttcctattgaaatgggatgatggaggagataggacacatttatcttaaacatgcatcttaattatctattgctggcggggtgtggtggctcacacctggaatcccagcactttgggaggccaaagcgggtggatcacttgagcccaggagttcgagaccagcctgagcaacatggtctctatccatctctacaaaaagttaaaaaattagccgggtatgggactgcacgcctgtagtcccagctactcagggggctgaggtgagaggatctcatgagctgaggaagcagaggttgcagtgagttgagattgtgccactgctctctagcctgagtgacacagcaagaccctatctcaaaaaaatatattttatatatataatatatataatattatgatatatattatataaaaattatatatataatatataatatatgatatatcatatatgatatatgatatatcatatatcatatatatcatatatcatatatatagctgcatgacaaattattccaaaacttggcagcttaaaataaacatgttatctcacagtctctgtgggtcaggaatttgggagcaatttagctgggtgattctggctccaggtcactaattagattgtattcagactgtcaaccagggctgcagtcacctgaaggcttgactggggctgggagatccctttccaagatagcacattagccattggcaggaggcctcagctcctcaccacatgggcctctcttcacagcgctgcttgaatgacatggcagttggctgaccctggagcaagtgacccaagacatagaaaacaggaggaagctgcactgtcttgtttgacctagtctcagagggcacacatcattgcttctgccatattctgttctatagaagcatgtcactaagtccagcacacatgtttggggaggggaatcgagccacctcttgaaaggagaagtatcaaggactctgtgaacatgttttaggactatgatgtcatggcagttatgaaaactaatgtgtcagtgctgtatgtactgatatgaagcaatctccaagatgtatcttcagtgacaacagcatgatgcagaacgctaggtaagtctggatactatttgcagttttaaaaagggaggagggagccaggcgcggtggctcacgcctgtaatcccagcactttgggaggccaaggcgggtggatcacaaggtcaggagattgagaccatcctgactcacacagtgaaaccccgtctctactaaagaaacacaaaaaattagccagatgtggtggcgggcacctgtagtcccagctacttgggaggctgaggcaggagaatggcctgaacccgggaggtggagcttgcggtgagccaagatcgcaacactgcactccggcctgggcaacagagcgagactctgtctcaaaaataaataaattaattaattaattaataaaaaagggaggagggataaatatgcagttatgcatagactacctctcagaggacatacaataaactggcctcaaggaggagggctggggacaggtgggagagagatttgttttctgtaccttttggattttatttgagcaagtattactctttgataataaaatttaatttcaaaaatagattaaaataacatagaaataaataacattgttgaaagaacttagaatgaccagtttgagatggaatttttttttttttgaggtggggtttcactcttgcccagcagggagtacagtgacacgatcatagttcactgcagcctcgccctctcaggctcaagcactcctcccacctcagcctcccaagaagctgggactacaggcacatgccaccacacctgacgaattttaaaaaatttttagaagaggtgaggtcttgctagattgcccaggctcaaattcctgagttaaagcagtcctcctgcctcagcctcccaaagtgctgggattacaggcataagccattgtgcacctggttggaattcactttttaaagctattggggccagcagtgagctatgattgtgcctgggtgacagagcaagaccctgtcttgaggaaaagaaaagaataaaactatcagggtagatgattttaggggattggtttgcttgctttcttgcttgttttcttggaagcaagtgtactttcttggcaggcatgttttgagacaggaggctataagcaagatgttgaaggaaaacagaccaagctctctgaaggagagcacttggaagagaatctcgtccagttctcatcccgtgcatgcccacctacctggacttgcacatatctgctatattttcccttctgtgactacagagaaactgtccacaggcagctccttcacttacgcattagagtctggcctctgtcgtctgcatcctccagcaattccccctgcctttcttggatctttgatttgtgttcctctggatttattaacaaacaaacaaacaaacattacttctcccatctgaaaaaaaaaatctcttcgtccgcatttctctgttccctttatagcttgcttgaaagagtttcctcagtgtctcctattctgtctcttttcagaacctgagatatagctcacactccataaaattcacctttttagcatgtacaattcagtggtttttagtacagtcacaaacttgtgcaaccgtcaccactatctcatttcatcactcccgaaagaaactctgtacccattagcagtcactccccaatcctcctttctccgaacccctggtaatcactaatctactttctgtctctacggatttgcctcttctaaatattttatatcaatggaatcatacaatatgtggatctttgtgactagctcctttcagattgcataacgttttcaaggttcatctgtatgaaccttgtatcagcatgtatcagcattccattccttttcatggatgagtaatgtttcattgtatggaaatatcacattttgtttatcgttcatcaatttatggatatttgggccgcacggtgactcacgcctgtaatcccagcactttgggaggccaaggcaggcggatcacttggggctggagttcgagaccagcctggccaacatggcaaaaccctgtctctactaaaaatacaaaattagccaggtgtggtggtgcatgcttgtgattctagctactggggaagctgaggcatgagaatcacttggacccaggaggtggaggttgcagtgagccgagatcacctgggcaacagaacaagactctgtctcaaaaaaaaaaaaattatggatattttgggttgtttccgccttttcattattatcaataatgctgctacaaacattcatatacaagtttttgtatgggcatatgttttcaattttcttttctttttttatgacagggtttcactctgttgcccaggctgcagtacagtggcatgatctcggctcactgcaacctctgcctcccaggctcacacgatccttccagttcagcctccccagtaactgggaccacaggcacaggccaccacacccagcttttttattctttctttctttctttcttttttgcagttttgctcttgttacccaggctggagtgcaatggtgcaatctcggctcatcgcaacctccacctcccaggttcaagcgattctcctgcctcagcctcccaagtagctgggattacaggcatgtgccaccatgcctggctaagtttttttgtatttttagtagagacagggtttctccatgttggtcaggctggtcttgaactcccgacctcaggtgatcagcccgcctcagcctcccaaagtgccaggattacaggtgtgaaccactgtgcccggctagtctttctttcttttccttttttttttttttttttgtttttttttttttggcggaaacacagtcttgccatgttgcccaggctgatctccaactcctgggctcaagcgatcctccctccttggtctcccaaagtgctgggattaggcgtgagccaccacaccaggcctcggattttctatacataagatcatgtcatctgcaattagagatagatttattccttcctttccaaagtatatgtcttttatttatttttcttttttaattgcccggcctagaccccccagtacaatgttaagtacaaacgacaagagcagacatccttgttctgttcttgatcttagggggaaaacattcagccttttcagtagtaagttgtcggttagctgtggcttttctctctctctcttttttttttgagacagggtcttgctctgtcatccagcctggagtgcagtggtgtgatcttcgtttactgcaacctcctcctcctgggctcaagcaagcctcccagcccccaagtgtctgggatcacaggcacacaccaccacgcccggctaattctgtttttttttttttttttcttttcggagacgaagtcttgctgtgtcatccaggctacagtacagtggtgcaatctcggctcactgcaacctccccctcccgggttcaagcaattctcttgtctcagcctcccaaatagctgggattacaggcacgtgccaccatgcccagctaatttttgtatttttagtagagacagggttttgctatgttggccaggctggtcttgaactcctgacctcaagcgatccgcccgcctcggcctcccaaagtgctgggattataggggtgagccaccgcacgcagcctccggctaatgtttgtattttttagtagacagggtttcaccatgttgcccaggctgagctgtgggtctttcatagatgtcttttatcagattaaaccaattctcttcctagtttgttgagtgttttatttataatgaagcaacattggattttatcaagtgctttttttcatttactgaaatgatcatttgttttttgtcctttattccattcatacagtgtgtgtattacattgatttttgtatgatgaaccaatcttgcatttctgggaaaatcccatttggtcatggtatatactcctttttatatattgttagattcagtttgcttgtattttgttgaggatgtttgcatctatagcataaggtgtatcattgtgtagttttctttttttttttttttttttttttgagacggagtctcgttctgtcgcccaggcgggagtgctgtggcgcgatctccgctcactgcaagctccgccttccgggttcacgccattctcctgcctcagcctcccaagtagctgggactacaggcgcccgccactgcgcccggctaattttttgtatttttagtagagacggggtttcaccgtgttagccaggatggtctcgatctcctgacctcgtgatccgcccgcctcggcctcccaaagtgctgggattacaggcgtgagccaccgcgcccggccggtgtagttttcttgtgatgtctctgtctagttttgttatccaagtaacacttttctttttttttctgagatggagtctcactctatctcccaggctggagtgcagtggcgtgatcttggctcactgcaagctccacctccctggttcacaccattctcctgcctcagcctcctgagtagctgggactacaggcgcctgccaccacacccggctaatttttcgtatttttagtagagacagcgtttcactgtgttagccaggatggtctccatctcctgacctcgtgatccacctgcctcggcctcccaagatgctgggattacaggtgtgagccaccgtgcccggccccaagtaacacttttcatggtaatactggcctcacagaatgagttgggaagtgttctccccttttctattttttggaagaatttttgaagagattgatgttcctattctgtcttgagccactcctcccagcttgttacctcccctaccataccgaaactgctcttgtaaaggtctccaatgtcctccacattgccaaattcaacaatcagttctcagccatcgtcttaccactcagcaagagcatctgatctcagccatcgtcttaccctcagcaacagcatctgatctcagccattatcttaccctcagcaacagcatctgacacatttcctttctcctcggaacactgtctgcttctggcctccacaatctcctggttttctttctgcctcactggccactattttccgggcttctttgctggattgtcttcctctatcagatatcttaatggtgaagagacacagggctgagtccttgacaccttttttctgtcttttctcagattttttgtaattttatttctctcctaaatttaaacaccaactatatgctgaagcctcccaaatttagagcccaaatatggtctctctctttatctttagatttatatatcctctgcctattagacaccttaccttggatgctgaatgtatatctcaaacttaacatgtccaaaattaaacttttgatctattccaccaaaatctgctatgcccaccatcttccccatcattattaaccacaactttagcttttcagttgatcagtccaaaaatatccgagtcatccttattggatactttctttccctcactccctacagtcattctattagcaaatcctgttgggcctaccttcaagataatcagagagtggccacctctcaccaccgtcatgatccaattatctccctaatctttctctagctgggattgatggactaggcttctactggtctccctccttccccctttgcccaccttcaggctgttcctgggacagcaaccacctcagagtttctgtcataaataaatgttgaattttgtcagatgattttctgcatctattgagattatcgtatagttttccttcttcagtctgttaatatggtaaataacatagtttttggttctgttttgttttagatgggatccctgcctcccaggctggagtgcagtggtgcaatcatggctcactgcagccttgatctcggctcactgcagcctcgatcacccaggctaaagcaatcctcccacctcaatctcccaagtaactggtactatgggcgtgtgccacaacgcctagctgacattttagaaacaaaatctcattataaggtctcataatgttgcccaggctggtctcaaattcctgagctcaagcagtctccctgcctcagcctcccaaagtgctaggattacaggcatgaaccaccacgcccagccaacattgatttacaaatgttaaaccaacttgctgtgctgagattaaccccatttggtcacgatgtattatcctattcatatatgttagaggtgacttgccaacattttaagaatgtctgaacctatgttcatgagggatattggtctgaagttttcttttcttaaaatgtctcaagtgtttgttgagtgtataaatgagagcctgttggtccaaggggggtgggtgggagagtgtattaagaaggaaaaaaatagactgggtgcggtggctcacgcctgtaatcctagcactttgggaggctgaggcaagcggatcacctgaggtcgggagttcgagaccagcctgactgacatggagaaacccccgtctctactaaaaatacaaaattagccaggtgtggtggcgcatgtctgtaattccagctactcaggaggctgaggcaggagaatcgcttgaacctgggaggcggaggttgcgatgagcctagatcgcaccattgcactccagcctaggcaataagagtgaaactccatctcaaaaaaaaaaaagaagaagaagaaggaaaaaaaatagcacatttatagggctgtttccaaagcccttttcacataccatttaattgtcataaccaagaggtgtagatattactatcatgcccattataagagaactaagactcaaggagtttaaggaacctgtcccagacctagctaaccagaaggactgggacttgaacccatgccctctgtctgcagatgccatgttcgaggttagtacccagtgagtgaagacctttagggacaggcagaagggctcctttcagctttgattatgcttgtgaccatttcccaagggaaggagcagagcttctgccatgaacatgatacaagtaattccatgtttcttacttacagcatcttaagaaaactccagcatggcagaatgagcactccacctgcagatgcccaggagagcctgagacttatttttagccagaataggaaaatgccaaatatcttctaggagagttggcagctggagggctgctgatacagctgtgtttatataagctggtgcagaggggagaatggtggttgcaaaggaggcaggaggtgcttaatccacctatacacttgctgaggttttcttgggaagttctggtcaggagttactgctcaggagagagcgtcatgcagacagtctggagattgccaggagcataggtgcaactggcttccttgagtcagagcatttgtcaaagccgcccttaaatgacctgtccactggtcgttggcctcttcccaccctattatccaggggtaaataaaagaacagaagctctttcaaatggtgccattttatttattttttgagacagggtctctgtcacccaagctggagttcagtggcgccatcacggctcactgcagcctccatctcctgggctcaagcaatcttcctgcctcagcctcctgagtagctgggactagaggcccacgcccaccccccaccagctttttaaatttttttgtagaggtgaggtctccttatattgcccaagctggtctcgaacatcctaagctcaggcgatcctcccacttctgcctctcaaagtcctgggattatgggcatgagccactgcacctgaccctcaagttttaaagcatagaggttcacccgattctgaccatacttctcagatgtgcttggtgaaagcaatctataacaccccatcctacagaagctgtcaaatagttttctcacagaggcagcaaaataaggcttttaaaggtgttacctatgggctctcaaagagaattaaagtaaaacgtaccttagtaaggattttttaaaatattttttaaaatgttcaaataaaaacaaaagtagagtaaatagtataatgatctctcatgtacatgtacccaccactgaacttcaacacttactaacatggtcaatctgtttcattgttcccccacccattttggaattatgctgaacaaagcccagatagcccattatttcatctgaaaatacttcagtgtgtacctctaaagtataaagaatcttaaaacaaaacaaaacaaaaccacaataccatcttcacactttaaaaatgaactattggccaagcatgttggctcatgcctgtaatcctggcactttgggaggtgaaggtaggcagatcgcttaagttcaggagttcaagctcaggagttgcctggtcaacatggcaagaccccatgtcgacaaatacaaaaattagccaggcatggtggtgcaggcctgtagtgccagatacccagaaggctgaggtaggaggattgattgagcctgggatgtcgaggctgcagtgagacctgatggcaccattgcactccaaccttggcgacagaacaagaccctgtctcaaaaaaaccacaattccttaagatcaaatatacagtgtttggatcgccccaactctttaaacaagtctttttttttcacttgttttttttaagtcaggatcaaatatatattgctgacgaaaccaggtgatttgtcctgtagtttcctatggtatggattttcctgatcatatacctgtggtgtcattcaacatactcttctaaatatatttattcattaatgaccaatgtatttcctgtgaattggatctagagacttgaacagattcacgttcaattctgtagcaaaaatacttagggggtgctgtatacttccatcagaggcagcaaatatctggtttctttctgtgatgctagcctatcattatcgcctagacccgcaaattgactgacaattaattttaaggaacaaatgtggctgcaatggctttctgagtaatacgtgcagaaaaacacgtcctgtaaagtgtattgtttgtttgttttttgttttctaggcatgaaaacagccctggaagtctgccctggcgcctgcactgagactaatccaggtcactttagggaaactgcccagctctggcaccgcactgtgtgtctgtcagctctgtggggtgctatggcctcattttcccactagaggacactgtggctccaggacttcatgtggcgcccagccagtcttgctactccagcacctctaaggaggcaaagcctttagtgtgcatttattaggtaccaactgggtgctttctgtatcaagcagagaaataaaagaggtcaaacacaaggtcctgtggcattgtttcctgatgtagtttctttctttttctttttctttttttttgagatggagtcttggtcttgtcgcccaggcaggagtgcagtggcgccatctcagctcacagcaacaactgcctcctgggttcaagcgattatcgttactcagcctcccaagtggccgggattacaggcgcccgcgaccacacccggctgatattagtatttttagtagagacgggctttccgcatgttgcccaggctggtctcgaactccttacttcaggtgatccacccgcctcggcctctcaaagtgctgggattacaggcgtgatccaccacgtctagtcgtgtttcctgatgtagtttctttgcattattttattttatgtatttgtttattttttgagacaaggtcttactgtgttacccaggctggagtgccgtggtgcaaacacagctcactacagccttgaactcctgggctcagacaatccccccatctccaccttctgagtagctgggactacaggtgcctgccactgtgcccagctaatttttaaattttttatttgtcaggatggagtatcactatgttgcccaggctggtctcaaactcctgggctcaaatgatcctcccacctcagcctcccaaagtgctgggattacaggcatgtatttccctttagaaaacaacagaggtgcttctccatctgctggaaaccattttagcccctgctgtaggatggctgcctcctgcaaattcggttacctagttgtttttttttttttttttttttcagacagggtctcactctgtcgcccaaactggagtgcagtggtgcagtcttggctcattgcaacctgtgcctcccaggctcaagtgattctcctgcctcagcctcccgagtagctgggactacaggcgctcaccactacgcctggctaacttttgtatttgtagtagagacggggcttcaccacattggccaggctggtctcaaactcctgacctcaaactatccacgcgccttggcctcccaaagtgctgagattacaggcatgagccaccgcacccggccgttggatgttttttttttaactgcaatatttgggctttggggagtgtgaatatatccaagaaagatgccaaagtgtattcatctctgaaataatttattcatttattcaactccatgtattgagtatcctgggcggggaaggaatggggaacggatgcttactgagagctactctgtgccaagtactgtcccatcctttttacctacatcctcacaagatgggtaatattagcctcatttaaatccaaggaaactgaggctcattgaggttaaccagcctgctgaaagttatcctgccagatgcaaatggaagtctaaatggataaatatgtatgttttccaccaaatccctcaatgccacactgacaagcatggtactaggatgtagagaaagtaagatgattatagagacatcctttccttaaggaggtcatcatataacacagaagttgcaataaatggacaattatagaacttctaataggtgggcaccctttcaataagtagctgaccacgcacagcctccctctgctgctatgacactgtccttatgcagaggtaggcactgaccaccaagaatagggcctctgcttgtagtgatgcctttgtgttgactgtccactcaccctcaccccatcacccccatgaccaaggtttctgggggcaacagcatgattcaggctataaccaccaatccgcatggagaatgtagcaaagccaagacagacatcttccctactgctcaaaatctctagtttaggctgggcgcagtggctcatgcctggaatcctggctttgggaggctgaagcaggtggatcatttgagaccagttcaagatcagcctggccaacatggtaaatccccatctctactaaaaatacaaaaaaattagccagatttggtagtatgctcctgtagttccagctacttgggaggttgaggcaggagaattgcttgaacctgggaggtggagattgcagggagctgagattgcgccactgcactccagcctgagtgacagagcgagagtctgtctcaaaaaaaaaaaaaagtctctagtttaatggaggaagacaaacacagacatatgcaataccaggacaaagcaatgagttcttgaaaattctgtgataatgcagcaaataattttaaatgcccttccagttattcatattttcttttcttttcttttcttttttttttttttgagacggagtctcgctctgtcgcccagggtgaagtgcagtggcgcgatctcggctcattgcaagctccgcctcccaggttcacgccattctcctgcctcagcctcccaagtagatgggactacaggcgtccgccaccatgcccggctaattttttttttgtatttttagtggagacggggtttcaccgtgttagccaggatggtctcgatctcctgacctcgtgatctgcccgcctctgcctcccaaagtgctgggattacaggcgtgagccaccgcgcccagccgggttattcatattttcaagcccacttagcctgtcccagccttgtccctactgcctcatagttcggccctggcagcacaactgaattcatattgtcagagcccaagctgtgttatttactaaaatctgaccagttgcactaaggagaaaatgacagctggcagctgggagaatggactggctggtgtaagttgggaaaaagagacacaggtggcaggtgtctaaagaagcagagctgtgggtgtttggagaggcccaatcccaaatgccacttcagcttcaggcaaccacagcttcaaggttccgggaaggaaggacaagcgtgggtgtgctccagccaccaccctcctccaagtgagtcctgggataatgaatgagcggtcagccagagtctttgctctctgatgaaaggacctccgctgcagactgtccctctgcaaatacgattgtgccccaggaaccatctggcaaatgtgccagttccttcagcatttctgttatttccgtgacttttggcccctttttttcctgggatataaattgttgcagcaagccaagccaagccagcagaatgtttactgccgctttgcaggccttctctgagcctggttaaccccatggctcacagcctatgaggctgctcacagctaatgatgtcttggatgcatgcgtctcccctctgccgttcttgtgtattttggagtatgcagagccaggcatgtgagctgcagcccagagctacagtgaccacattgagaagctgggtttgggggaagtgcatttctgttgcaggatgtccttcacggagaagggacaggttgatttcatctctctgcagatgacgtggacagctccccaaggagccacaacaggccaccccagctgtaggacagatcacgtgctttggctgcacaggggaggatgcccaacaaaccgagacggcccacgtcagccactgggccccattttgcacagtgccacgttcctcctctgacctggcctgatggtgggcgaggctgaagagttatgggtcaccttcagaccctttgagccagcccctcagtttcagtctgcttcgctgattttcattcagagaacagataccggcatgtggaaggggagacttactcaagtcactcatctccttggtgatgcacttcatgggcagggaagccatatggagccgtcaaccataagtcccctcatcccaacccagggagtaccagattgttctaaagggggggcagaggaagcagtcaatgcaaagactccccgaatgtcactgtcagcctaacagtggacaagtgggcagttccaatgcagattcacaccttcctgccttagtacatgcagttccttctgtcttgaacacatcaggccccatccacctggtgaactcctactcaatcttttaagatccagctccagcatcacctacttggacgccttaatgccaccacatcctttgcacccatctctacttgtacctgtcacattgcacctgcagttgtttttagctagcatgccttttccacctgacttcgagttcactgagggcagagaactatgtttcactaatctccaggtctagagacttggtctgtaaacgtgtttatcagcagtgttttggaagggaaaatcagggattatggaatttagagatggattctcctccagaaatctcttagtccctcccactggtttcacaaaagacaaaactgagattaggaaactgccttccccagggccacaaggctaaacagtgacagagcttggacaagagcctaggtctgctggccccttgtcctgctctcaggtactaagaaatcagatcctgccgggcgcggtggctcacgcctgtaatcccagcacttcgggaggccaaggcacgcagatcacctgaggttgggagttcgagaccagcctgaccaacatggagaaacctcgtctctattaaaaatacaaaattagctgggcatggtggcacatgcctgtaatcccagctactcaggaggctgaggcaggagaatcacttgaacccgggaggaggaggatgcgggaggcagaggttgcggtgagctaagatcgcgccattacactccagcacctgggcaacaagagcaaaactctgtctcaaaaaagaaaaagaaaaagaaaaagaaatcagatcctgaactgtatttcccctgccagctgggaaggagagctgacggtaatgaacaggcttctgggcccgcacaggatggagaagggttagagggacaccaattgaatttagagctggaagggatgtcatagatcatctagtctgacccctgcatttacagatggaaaaaaaaaatggaggcccatgggggtgaggtgtctgcccaaggtcacacagcaagctggtgagagaactaagctgagaacgcaggcctcctaattcctagggaagtgcccttgcccgactgaatgaacctcccaccccagaaagatggatgaccaagcccctcccaaccggctgctatccgaaaagcagatccctggagtccttgactcttccaggctttgtcttctctctgctggtggtgcaacacttaagtagggtgcattctgcataaataataaagaatgcttcctttgcagggaggaaggccgcatctgggcaggcagtgtgacagatggtatttacaatgtgcactgagaagttctcacacagcctcgcttgggctgtgtggctgagagatggaggaaacggatttgagtgcccactgtctcactcccctgcctgatgctcgcaggcagcggctgctgctgttaccgctgctcctgcatttctgttcgggactgcttccctcacgcccgttgcctcttgccatactgaatatggagctccaggatgtcttgctgctgctgctgctgatgctgatgctgctgctgcggcctcaccatcaaaaagcctgcctcgtggaccccacgtcattcttcgctgcagcccctcactggagcaggtgctgggctgaattgatgttcttccccagaggaggccaacgaagtcctaagagactagatgctgggcagacttcccagggattctggcctcggggaggccttctctaggcctgaagaagtataaataggacaggttcattcaatgagcaaatactttttgtgaaccttctatgtgccaagaatcattctaggagtcaaagatgctactgcagggcaggggcaatgctcacgcctgtaatcccagcactttggaagtctgaggtgggtggatcacttgaggtcaggagttcaagaccagcctggccaacatggtgaaaccccgtctctactaaaaatacaaaaattagctgggcatggtggtgcacgcctgtagttccagctactcaggaggctgaggcaggagaacggcttgaacccaggaggcggaggtggcagtgagttgagatcatgccactgcactccagcctggctgacagccagactccatctccaaaaaaaaaaaaaaaaaaaaaaagataatactgcaaaccaacaaaaccaatccttgcccctcatagacagtgagctctaatgtcaaggtttgccacaggtctcttacagctaattacccttggctgtgccagactcgcaccatttctttccctccacagtctgttggacactctggtgcctggttctgtgcagtgggtaagaaaatcagatcattctctttttttctgaggacactgattgcacacttaggttgagagaaacaaagcagtaaatagaccaatggaagttttagctacaaagccagagacaacccccaaagtttctgactcatacaagcctgcagctggacaagccctatttgtgcgctgggattcagcctggtccagttgccctgggaaagcagtctctgcagacagtggtcagcggtcggggccaagggcactcactaccatcaggggcttttgtatttcactctttaaataagaactttggtgacaggcatggagaatcaaacctccccggggcccagggattttagtgtccccatttataaaatggaggcaattgtatctgttctgctcacctcagaaaggcttgctttttgaggatgaaatgcaatggcaaatgcggaagtattttgaaataaaggcagcaggcatacaggcgcattattattatgcagaagaatttttttctccataacataaaagttgtctcttgttgcaggttgagagtaataactatataattagactttgtgtcatatcaagagaggcatcccctttttttcattaaacagacatttgttcagtttctacagtgtgcaatgttgtgcattgcgaaggatgcagaattgaataagccataatcctccccttcaaggaatgtacgttctagtatcaggaagataaaacttagaagatataattcaaagtcaaaaggaaaaagggattcagaggaaggagtggttcatttgggttggagagttgaggaaaggctttgtggaggagagagcattcgtcagagagatgggcaagattctctcctttattttaagggatcctcccacctcagcctcccaagtagctaggactacaggtcccatgccaccacacctggctaggttttaatttttttttttttttttttttttgtgagacggagtctcgctctgtcgcccaggctggagtgcagtggcgtgatctcggctcactgcaggctctgccccactggttcacgccattctctcgcctcagcctcccgagtagctgggactacaagtgcccgccaccaggcccggcaaatgttttatatttttaatagagacagggtttcaccgtgttagccaggatggcctcgatctcctgacctcgtgatctgcccgccttggcctcccaaagtgctgggattacaggcgtgagccaccgcgcccggccggttttaaatttttttgtagaggcagggtcttgctatgttgcccaggctggttttgaactcctggactcaagtgatcctcccaccttggcctcccaaagtgctgggattataggtgtgagccactgtgactggctgatgggtaagatagaacaggtggtttactgaagacacaggacctgcctatagcacagtgaaggtcatatggaagtcttgaggcccaatgagaattcagaaatgggaccctggggaccagccaggccccaaggaggtggcaggaaaggaaggtaagacctggcaaagtagctgattgtttccctgaatgtgtgactggctaaatcttgggactgggaaagtttttttctgtgcttttctgagctcaacttctgggtgcccacgccttgctttgaaagggtttggtctgtgaacctacacatctctcagtaatgatttaagttactcagaaaactgggagccctggagtgaaaggaagagacgaaagggaaagaaatccatgtagcagtcttgctccgtttgatctggcagacagcgggcgatgatggaagaatgctggagatggaggtggagggtggtcggattctgccatcctgagccatgtctgctgtttggacttgcagacttcaaacacggctgggggattcccggaagacaaaagaattcagggccgggacttggatctcagtcaaaaataacttacgtcttcatctcaggaaggcaaacagtggtagctcagggctggtttctcagaagattagagctacaggtggggacagggtgccacgaaggtcagtttaggtttaagctggctgcagagagagaaggggctcggagggtgtgggtctggcagagggagatgtcagaatgaaccccaagtgaaagaggttctggagaaaaagtcatccctgtttgccccccttctgggcattgccattgctttgagcaataattacagcccttcatgtttcttccctggcttctcattagctcaaggtgtccacaaacaaactgctcagccccctttgccttcctctccccgcttccagcagctactcctggcttttccatggcagccaactgtcccagttcccaggaccagaacatcgggtccttaaaaaaactccttcctctcttggagggcacatttgagagactcagccctggaaaggctcttctctctctcctcccccttatcccactggactgtcattagaggatgacctcattttcccccaggaggccagggcccgggtctcatcccctttgtactatcagtacctcggccagggtctggcacataatggacactcagcacgtgtgagctgaatggcactgctgagctgtcgccaacttaatcttcctaaaatgctgctccagttagaagccatcaccgcttctctatctcccactgggcgaggtccaacctcctcagactggcactcggggactctggcgacacagtgctcctcgcctgcccggccatcctcactttgtgctcagccacttcatggttcccaacacagtcaacagctttcctatctctgtgtctttgccgcagcagttccctccacctagaaacccttccacgttctctaccacaagcttgcccctttcaaggctcatctcaacatcatgctcctgcccttctaaaccgagtttgatccacccttccccagcccttcatcctgctctgcgttgacttcaagtgtcttgttaggaaccttaaaagaggccatggtgtagcgcacttgcaaaatgaagagcaaggaagaagtgccaataggcccagttccgtgtcacttctcattagcgccaaaggttctcccagggaggggcctctgcatggcacacctccaggcatcgacgagtgcctgcctgctgcagctggtcagtgaaagtgacaccatgcctactccctcctctgcccccaaaatgccacagaatatgccagtccttaggctgtctcaggtgagagtagaacaaaaggtgtcagggtgcctagccactcctatcccctggagctttctaggcctggaccccaggccccatgtcctactgcctgctcgggagtgggttgcagattcgcctggagctgaggggcagagtggtctgaccagctgggcgtaggtgacattgaggacaacaggtaaagggtggcctcaggctcatggaggatgatggatgtaacaacttgtcctaacagtctccaagtccagacaccatcacctcccagcaagggccaaggtgagagaagctgccccgtgaagcaagaatcctggtgagagatcaggaattccttcttaggagacttttggaaacatagcctgccaaggcggggtaaatgttcctagggacagaaggaggaacaagatagccttctggatgtttcccatcttccctctcccttttattctaactgctgccgcccttgtgacctcttccttggacagcacctctcatggccctctgctcaggccaacctccctcctgtctagactctacactacagccaaagggatcttttttgtttgttttgagacggagtctcactctgtcgcccaggctggagtgcagtggcagatctcggctcactgcaagctccgcttcctgtggtcaagtgattctcctgccttagcctcccgagtagctgggattacaggcgcccaccaccacgcccggctaattttttgtatttttttagtagagacagggtttcaacgtgttagccaggacggtctcgatctcctgacctcgtgatccgcccgccttggtctcccaaagtgctgggattacagccgtgagccaccgcgcctggccagggatcttttaaatattactctactgctcacaatccttcaatggctccctattgcccttaggtaaagtccaagctcttttcccatgaaactcacagcccctcacaaccttcccgtccaggctgggctctttagattggtcatcgtgctccagtttccagccatgccaaactgcttgtcgtttgcctcccatatgatgctgctccacaagcctggtcgtgctgttccctctacctggaacacctccttcaccttttccatgttgcctagttctggaggcttatcctttgggaagccttcctggacccacagcgaccccctcctttggagttctacaccttctgggcttcccttgaatccaggacttacccttgtgttgaatgtgactgtcacccccaattatccatttctggagggcagggtctggttcttatccacctctgtattctcaaagctctgtcattggtacttagtaggagcttaatacatgttcaggaacagaactgagcctgctaagctcccttccccacgaagggatgacagagttggatatgttgataagagctgtccctgggctgatgaagaggcagctccctgggtagctggtatcagaacactgtccagggtggctgggcatcccagcagagtggccaacccttttctgtgcccttctccttccagttcccctggaaccagacttcctggcccacttctctagtcccagagatctaagtataacagagccaacacccataccggtcatgcaaatgacagcctgggatgcgggaggcagcgacacagaccccagggccccagcggtcatttgtccttctgggctcctcttcacaaaggaatcagcctctcttctgtcccctgaaggctgttttcaaaatcacaccccatgcagacagttttatttacaaggaaatcttggcaggatcttgacttgttagtagagtagggatggggaggagggtggtgagaaacaaaaatagttgaaatgatcacactttctgaaacagagatgaaaattggtgtctgtagcaaactcacctaattagaatcaagtgaattcccttctcggtgtttaaggggagcagtcattgctgggtgatggtcgcagttcggatcctgggcacggggttatgtctttgctttctgaagatgactgcattagttgcagctctcactaatggaaaggagcctgttccgtttcccagaggaaggaagagggcaaagactagtgagtgagtgggtggtgggaagaggaaagcaagaggagtggaagggcacagccttggtgtgggctggggactgactgcgagatgcctcctggagaagctcctgagcctctggggagagctggcccctgccaggccggccactagcaccatttacagccagagcctctgcttcgggagatggtctctcttgggggcgctttcctgcagggaaacagcatcgattgttttctttaaaagatcccctactccgttttggctaacttcctttctgattgctttagtttctttaccgtccctctccccagatggggcatttccctgggcttacctttgtccatgtggtcaaatgaagcctgggcatggtcacttagctctgggtgtaggaagggcaagatttaggctttggggcccacgaccccgcaatctgacttctcccatttctgggcctcccgagacctcccagaatctgagaccgcagtgaatagggcgtaaggataatggggcgggaggcaggaatcccgtccttacaacatcgcgcccccaattcactcctagttaaccctgacgtcgccaacatagtgtctccatcacatatctgccacctccaagtgatggttaagccgatggaagagccaagcccgggcccggagtgcaggccggtggtgaccgggccggggacggcgcagtccccatccccgccccgggcagcgccaccacttcctcgccagccccgccgcagccctcccgctcccgggccgcgccgctctgaccgactgggcccgggtggcggcgcccggggtggggtgcggggcgggggccggcgttccccgcgagcagccccgcccccgcccgcgcgccgcccccgaggactccgcggggaggaggagactcgggcgcagagcgggggccgcgagaagcgggaagggagcgcggggagcggcggggccggggccggcccaagggcgccctcgcctcggagccgggcgcgagggccggggcggaggcggaggccggcggggcagctagcgcagtgaagtttggcggcggaggggccgggcgtcccggggtcgcgaggaggcggcggcggcgcggggaccggggccatgggggcgggcgcgggctgcggagcgggcgcggaggcggcgcggcgcgcactgagcccctggagcggcgcggccgccgcggcgcaaagttagcccggcgccccgggacgagccccgcagccgccgccgcccccggaccccgtctcggccatgggcgagcaccccagcccgggccccgcggtggccgcctgcgccgaggcggagcgcatcgaggagctggaacccgaggccgaggagcggctgcccgcggcgccggaggacgtgagtgccccctccccgcccggcaaactttctagggggcgccggggggaaaagccgcccctgtctcgccccacgccgggcaacttggaggtttcagggtgacgcgggagcgccccggattggccgggtccccgcgggcaggagggggcggagggaccggtctccccgaaacgcgcgcgcaccgcttcccccgctctggttcccgcggcttccctgcgggacacagcaccgccactgcgccgcggacctgtcaccgccggagccccctccccgccgctggtgcagtgcccgggacacggcgttttcccgcagaggcggccgcgtcacggcggtgactccccctcccctcacgcccgcgacctgcgagctcccggagctggggaaggagcggacgccgcagagtccccgtccctggccatgcaagccggcctggcgaccccttcctccgctcccggattagctcccgcccggcacctgccttgccgcgacactgattgaaattcaagccggcccccgcctctgaccccggccggagcagggaggcaaagagtgctgggagcggctttgctcctagaaggaggcccgggagtccaagaccgtggcggtgccaggggacggtcccctgggcgaggagagggaggggctgccccgagggcttccccgccgtctgctgctcgggtctccatccctccggtcctgcgggccggccctgcgaagccctgggaactggagtttcttgggttaacctcccggggctaacctacacataggggtgaaaaaccgggcagacaccctgccctgcccactcctccctcagggtggggagatggaagtgaaaccaggcccccaacccacacaacgaaagcgggaaagtctgaatggggttggggggtagtttacgatcttctctctttggcgtctgcggttaaatctatcacttccttctggccctaaacccctggcagaatctgatgtagtcaccacttagactcagccttggaagagaatgggtgggcttcaccgcattcggcattcaccacccccccttccccgcaaaaaaacaaaaaacgaacaaacaaacaaaaaactgcaggcaaaatgttagtgtttatgcagaggtgagttctcctggggggggaggggggggctctagctcccagcaggtgagactcattgcgccggggtctgatggaattgcacctggccatgctctcccaggcctgggagtagctgtggacataagctttaggcagcagaaattattagaggcgcttggacatatttggacgcctttatttagtaattgttgagaatcacttgttctgccagttccagaaccagcaacacccaccttgccgcccccgcccccaccccatcccttactgtgagtttcctccctctgctcagtgtggactcattggggagctcctcccagacttcccctgctctcctgtggccagtccctgagcctggtcatgactcctgggcagccgctgggaggctatgtcagaaacatccgaggactacagagaccttggtgataagtgtgtctttctttctctcctcttcttcctctcctgcatggcctccctctctgccagcactggaaagtcctgtttgatcaggtatgtgagcagttaaccccccatttccttccagccctccctgaaatcggtctcagtctccctgcttgcgtgggcttccctagctccgcgctcctgagatggtgacgtggggtgggggtgtggctttgtgcatctctagggctgaacgacactgctctccaggtatcaggaggaagagatgggctcccctgagaggatctccctcctgcctcctccctactctgctgcaccagagccgggtttacaccatgtagaaattggacgttatatattgaatgcctgggaaatcctccatatgccaggggattgcagtagggggctggagaggtgggggaagggcttgggctgacaatccctctccgtttctacctccactatggagggtccatggccaccgctgaagtcaaatctctgccatccttgggggctgactcacagtatggactcttttgaagtctaattcaatgtctttaattctgtcatagggatgagggagtgctgggaggttacagaggggaaattgtgtgtgattcttcgcaatgcctggagtccaggtgtagggcatggagttgggggtgccaagtattggcttttgaacctggagatggacatttgaccttcagcaaggaaatggttctcctcttagcattcgtggtgggtgctgttatgtgcttccttctccctctttgccccatgttggaggatagttgagtgctatagtcctggggtgagaatgattgtgccatgaagtttgtgcaactttaagaaattggtgtgagtgggccagagggaatgtgttgggtaggagaaggagataaagctgaaaaattagcttgaaccaggacttcgttgtaggcaggggaagccttagaaagttttttagcagggttgttatgtgatccaagccaggcttgggaaagctccagtgtcttaggggataaggagtgaatgggctacggggatgagggaagctaggcaggagctgcagcactgaacagaggcaagaaggtgacagtgaggatggacgggaagagggacatggtgatggaagaattggaagatcttaatagaccgtaggtgaggggaaccacatatctaactttgagattctgaacctaggagggaaagaagttggagtggggccaggtgtggtgactcacgcttgtaatcccaacactttgggaggctaaggcgggaggatcacttgaacccagtagttcaagaccagcctcgccaacaaagtgagacctcatctctacaaaaaattaaaaaatcagccaggcatggtagcacactcctgtggttccagctacatgagagactgaggcaggaggattgcctgagcccaggaagttgaggctgcagtgagccacgatcgtgctactgcactccaacctgagtgacagagtgggaccctgtctcaaaacaaaaacaaaaaacaagttggagtgaggagagacgtttggcaaaaatgacaactttggtttgagacaagttcagttagaggagccagccggttgcagatgccggagtgggcgtgatgacacggaattgcagcgcgaaaggcctggggtgaggatttggggtgatcatccacattaaccacgaggtctggctgtggtttgaagttcaaagcatgcactggctcctgtcctgacgggtagagcatctctccctctggctcctaagagtacagcagctgctggcctgatgccccaaggcaggagggagcccgctgcgccactgccaccactaccaccaagctgccagcccttcacacctcctgccagatttagaatcagaacctagaacaaagtgtatcattctttttttttctctgtctgtgtctatctttttcatttgattaatttcctttgccagtccctgtgtgtatgtgtacattttaaaacaaaccatttgggtgaaaggaagagagcttttagtaggaagattttggaactcaagggagcagaaagaatgtgtagcacctaatagtagctagtggtctattaaatcgaatttttccaactgaaggtaggtcctgggtcctgggtgtcacaaagagcatacccctgcttctgggaggcctgcccagaattaattctaggaaagaaattaggccaggcacagtggctaacgccggtaatcccagcattttgggaggctgagacaggaggatggcctcccaaaaagtgagaccctttctcaaaaaaaaaaaaaaaaaaaaaaaaagaagcaagcaaccctgatagatcaaactgcagtcatggatgggacatgacacctctcagagtccctgtaagcacaagtgactctggagttcgccttccagagatcaatggcatgggtggctagaaccagtcaagtatctcctccctcccttcttgggtcaagcagacaccagtggtagcccaatttcaaactgggatctgctagggtctgttttccaggtgttagggatggattagaccagtccctccataatgtctggttcttcagcatgtggagtagccttgatctagcatgacgccaactggaccccaagggctagaagccatggtgttggtcttgttggtcctatatggtcaccgtcgaactaaatggccaggataccttttgtggggactggaggtgatgaaagcaggtgaccccagtcccatggaagcttctgcatccccctccctggcattgtggcatctggcccactcaagcaggagtgttagcagggccaatccatgccacgcaccctcactcccccgattcttccccatgggtcccagaagttgcagcaggtgggagacctgagggtcatcagttcaactcggtatgttccatgtgttcatgtcctgttcaaacttcttcttgagggaatcgtcttttcatattttggagatcttgatggttttcctaaatatttaagtagatttaaaatttaccataaatattagtctgttgttatagtataatatcgtagtaaagatgttttatttttctgactgggtgctcacacctgtaatcccaacactttgggaagccaaggtgggcagatcgcttgagcccaggagttaaagaccagcctgggcaacatagcgagaccccacctccgttttttaaaagtttaaaaaaaaatttgttaaagaaaaaagtcttattttctgtggaatctgttgagcttttccttcctgattccttctgttgattcagacctgagatagttttcgtacctccccagatctcataaatatgcccttttatttcctactactttttctatgattaaaaacatcatataaccctgcactccatctgcatctgattcctatccagctatgctagcatcacttattaagtaagccttctttattatattgtttgagaaatgttatttggtaaatttttgtgtgtggttgggttgatattttatttctgatttatgccactgatatttataattttgcacaggtaatgtcccctttagttatcgctttacatctgttccataggtttctgaaaagcttccctttttcgggttatgctttgatagtcttattctcagtcccttcctgaatcccaggaagctttgattcaaggtcaaatatttagtcaaaggccaaatagcggggcagtgacagatatgggaccagagcccagttaacccacaaagggcttcttgggttggaaaagtcatttccaggtttacccttaaaaatgcctccaagatctgtgaatgtttaatgaacaaaagagtttggagcagagttccgttaagtcaacaaagcacaattgctttcaagctcaaaagaacaagagggaaaatgcagtattgaaagtaacttgactatcttcctttttcccttctcactgggagcctgtatttcctagacccccaaaagagatccccaattttgctaatctcccagaaggaaagcagacaagtactgactgtctcaccaaaattataaacataaacatgtgctacgatgaacagaaggcgtggatccgccgcttcggtgggttgctggggtcagaaacttggatttggagtcagatagacctgggttcaagtcttactcactttgtgatcggaggtaattacattagctctctgagcctcagtttcttcctctgtacaatggggacgtaatatttaacttcagggtgactatgagaattaaatggaagtggaagctccctttgcaatatctgatttgcagtggatattcaacagaagtatcttcattgagaatcagaatttgcttggagaagcacaaggaccacttctgagatccaggcccctacggggaaggcagctcctcaacacttctgagcccagaggatttttttgctttctgacttccagtgtctccccttcccagttccctgccctccagcctggggctcttcccttggcctgacttcatttgtagtcccccctgcaagctggcttaaaggtgttctgggagctgaaaagaggttcagataagacccctgaagggattagcaaggagctgcagagaaaactcctgccccagagacagggtgttggccacccccagaactcacaattaaccagcagagcagggttcccagagaggaacaaagccacgggcttaactggagcccttgggctctgcacccccaactccttatcaagtggtctctaggacccttgaggctgtggactcctcttcaccacagagcctgcttccctaccttactcctgccccagtgaccccatcagctatactgacattaacccttttattcctgaccactcacagaaatgcatttgattgctttgggcaacagggccgagggatccgaggttgaacttcgcctggctgcctgcctgacacataatagatacacacgtttgagcgaacgacaggtcgaactacagctctgcatgcattgtcttgggttaaaatatcctctccaagagcaggccctgactgtgcagctaccacactcacggcagcccctctgccaccgtatggctgctgccacctcaaggaatataggttattagaaggttaatggaggcatcttgtccagtctgctcattttgtttttgtttttgtttgtttgttttgagacatagtttcgctcttgttgcccaggttagagtgcagtagcgcgatctcagcttaccgcaacctccacctcccgggttcaggcgattctcctacctcaacctcccgagtagctgggattacaggtgcctgtcaccaggcctggctattttttggtatttttagtagagatggggtttcaccactttggccaggctggtctcgaactcctgacctcaggtgattcacccgccttggcctcccaaagtactgggattacaggcgcgagccaccgcgcccagcccagtccgctcattttgcaaatgaggaaacagaagtcagtggcctactgaggtcacttggtgcaatacagccagagcggagactagatcccaaccctgctttctatctgaactgtgttcctgccaccaggccattcacttagttggtgccttgagtaaccaaggcaggtggagaggacacatatctaggtcaagtctcagttctgctcctactaggtgtgtggcaatgggcaagccaggtgacctcttcacgcctcagttttctcatccgtaaagtgccagcctagtaccttcccccctacgttgttgtgaagacgggatgctgtgtgtatagtgcttggcacagtatgtagtgagcacctcataaatactgttgtgtgttacagcaatttaaacaagtaaaaaataaaaagacatataatagagtaggtttttttgtttttttgtttgttttgagacagagtctcaccccgttgtccaggctggaatgcagtggtacaatctcagctcactgcaacctctgtcttccaggttcaagtcattctcctgcttcaggctccgaagtagctgggattacaggcgtgtgcaatcacacctggctaatttttgtatttttagtagagacagggtttcaccatgttggccggggtggtcttgaactcctggcctcaagcgatctgcctgcctcagcctcccaaagtgctgggattgcaggcgtgagccaccgtgcctggccagacctcggtcttgaatcgaagtgttcagagccccagttggggttccttccaccatatcaggctgcctgctttaggggagaagctgaaaaatcacatttcccctgaactttccagagagaaaggagagaaggttttggacaaaggctgcctggggagtgttgtgcatggcagagggtgaagggtgagacgaggcgtctggccatcaggtagacagggctagcactcctctgtctggtgttctgatctggcaattcctgctggagctttacttagtggtctatcgtgacactggggccattgtcttgtgctagagaaaccagtccgtgtgtggcttaagctgtgaacaactagaggtagcccccatcaccattccccaggcttttgtgaagcaaggtacaggttgaaatcagtatatttgagtcagtaaatattcttcgagggagcaaacattgaatgtctaactgcatgcttataaatttgttgtctcattttgatctctcagcagccctgtgaggtgtgtggtgctgcacctcaaaagaggaaactggctaggtgcagtagctcacacctgtaatcccaccactttgggaggttgagaggggaggatggtttgcttgaggccaggagttcaagaccagcctggtcaacataacaaaaccccttctctatttaaaataaaaagggaaagtgaggtttgagggggcggagcttgcccaaagacagcagtgaggaccttttgcggcagtcgcatgtgtatatatgtgtgcacgtgtgtttgtgcatgagtgtgcatgtgtgtgtatgcatgcatgtgtgtttgtgtgtgcaagagtgtgcatgtgtgtgtgtgtgcacgcatgcatgtgtgtgtgtccccacaaggcttctgggtagctcctgaaatgggccaggagatgcaggagcagctgagcaccctttatccttccagccctttatcctgcctgccatgcacccgctctgcatcttgctcccctccttctccctggatctgttggctctctctcctctgggggaccagagagaccctttggtggctgccaggagaagcagcggcggccagcagtttaggctgaaggggagagatggggcgatgtcagatccctccctgctgacattcactccccactccctgcctgcagttcccttgagactcctgggcttcatggccatgactcggcttcagtccccaggcggcgcgtcaggctgggccggatgagtcagcatggatgttacatctgctcctcctgggtacccaagggcctctgagtcacagcccctggcagccccctcagtggcctgccaaaggcaggggccattctggaatgggaagggagccgtctgtgtgcctgggaggccttgtgaggaggtcggaaggaggagaaggggctgcaggagtcccccaggggcgggaaggaataggcccagtggaggaggcagtcccccaacccgtgctgcccaccccacccatccccagctgcatgcgttccagggaaggtgtgaggtcgtttctttccctcacttcccagatgttgggagagctggatggttttctggaagcatgccgattgtcaagggctcagcctgagttcaggccaggatgcctgtctctccctaatcagcctggctgccccatcctaggattcggctgttcgactttgggcaagggggatgctcaggaggctgcttggggcttttgggagaagcaccatgagagggctgagctgcctcccgcacccctctatggtggcagctgagggagcagaaataataaaactgggaatcccagaatcgtggaggcttctccagctgtcaggggcctggcctggccagatcccaggggagtaggggtcacaagggcccctcatgcctccatctggtctctctccttcccacagaggcttgaggtctctgaaaacccactcccagccccagcttgaagcaggccagactgcctgggtccaccccttccagagtgcctcaggcagggggcatgtctctgagtacctcaatttttgtatctgttaagtgggacgaaccagacttactctagggttggcatgagaataaaaaaacaaaacaaatgtgaaagtcagtattttaaagagtcaggggaaaaggtcaggggaagggtatgaggtggttttctctatgggacaaaccagacttactctagggttggcatgagaacaaaaaaacaaaaaaaattgtgaaagtcagtattttaaagagtcaggggaaaagatcaagggaagggtgtgaggtggttttctctatgggtgaattagcatcctcatttgcaagaaagcagaactgggagagaaagctcctactcccctaacctccccgctgaccttggcagctgcagcctggacctaatttacggggctgtaaatatccatgaaagggccagagttcccttttgggctctggctgttgggtggggagagctctgctgaaccacaaacccctgggcagcctcgttaattctgctctgctcagaagacgagtaatgaggcagggggccagcagttgagccatggtaaccttcaccagacagctgcctgcaccatacttcagccctagcaccgtactccagccctagcaccggactccagcgctagcaccgtactccagccctagcacagtactccggccctagcaccttactccggccctagcaccttactccagccctagcacagtactccggccctagcaccttactccggccctagcaccttactccggccctagcacagtactccggccctagcaccttactccggccctagcaccttactccggccctagcacagtactgcggccctagcaccttactccggccctagcaccttactccagccctagcaccttactccggccctagcaccttactccagccctagcacagtactgcagccctagcactggactccagccctagcacacgtgcctgtgctcatttcccagggctcattctgccttggtgtgtgtacatgggagaagacaatggggatccgggtgggaacctgctctagatcccaggtctccaccttcctgactcaagaggtctttaccccagtggcagctggttccttggctctgggtactgcctttgaggtccttgaaagtactcacatccctcactgaggtccagggcctgtctagagcatggacagggagagggtcctcctgggagagagaattcaagccttggaggcagagaccagacgtgtgtttgccctgaaaatgcagctggtgaaaatcacacatacatcatagacacaagaagacagaggtatgtccttctctctctcatgcttccctgttgctgggcaaattctgaagccttggcctggctcatgggcctgcagctgggaggggagaagcagtgctgctgtcctgggtgctgagcaggcaaatcccagctccagcggggtttgctccctgagagctcggctcagtggccccattaggccagtcacggactcctcagcctcttctgaggcctggtgtccccagtcaaccctcaggctgggcctggagcccacagacttctagcattgctggaagactccagcaaagtgtcagctgctcggagacctatgctactcatggggcggaagtgaaaggctctggttctgaaccagcggcaaaggggctaggttcaccaaagggaaacgtgactgctgtggactcataccttgttcccaaagagtgttccatcaagtgttactgtgaaaaaatactacgaccaaaggtcaaataagtttgaagaatgctgggctgaacaaaatcagacaggtttctccagcctaaaaccttgcagagtccttgatatggtgcgttatgaccctccaagaggtttttccacttgtaggaccacagaacccttatttcaggtaccatcaggtacctggtattccacagaacacacattgggaaacccttaaaaatcagctgggtgtggtggctcacacctgtaatcccagcactttgggaggctgaggcaggcagatcacttgaggtcaggagtttgagactagcctggccaacatggtgaaacctcgtctctactaaaaataccaaaaattagccgggtgtggtggtgggtgctgtagtcccagctactcgggaggctgaggcaggaaaattgcttgaacctgggaggtggagcttgcagtgagccaagatcgcaccactgcattccagcctggcgatagagtgagactccatctcaaaaaaataaaaataaactcaggggctatgtttcattcaaccgaacaagacagagaaaaacaagggagggcaagatgggaccagccagcacagtggaggaatcctgaactatttctgtcttgaccgcgaactcactctctgacctggactagtttattttgttccttttgccctatgcacctgtttccccataaaacgagtgggatgcctgggccacagttgatccttagtgaatatgtgttaggtggacacataagaggattggatgagggtctctcaaactctctttagccacagcactctagtgatgggagagagtgcaggctctcgcccctctgcctggatatgaatccatctgcacctattaccagccattcacacttgggcaacccagctcttggtgccttggtttcctctcctgtaaaatggagctcacaatagtgtgtacctcttagggttgctgtgagatttaaataggggggaccactctcaaagtgaccaagttaggacactttgagagtaaaggagctactgtaaatcacactcaaggctgggcagggtggctcacgcctataatcccagcactttacgaggccaaagtgggaggattgcttgaggccaggagttcaagaccagcctgggcaacatagcaagaccctgtctctacaaaaaaatttaaaaattagccaggtatggtagcacatacctgtggtcccagctactcaggaagcaaacacaggaagattgcttgatcccaagaattcaaggttatgaattctacaatcacatcactacaccccagcctgggcaacagagcaagatcctgttgtttcttaaacaagaacaataataattaatatgcttggacaacaggtatatgccaggactaacacagaaaaaccagggtgtgtggtggcctgaggtttcagtcaaggggtgcctgatacatagcaaactttccacacatatcagcccttatcgtgttgctgttcaccaggatagtatgcagaaggccagcacataaactagctccgaatggagctgccctgcctgaggagggctgggggctgctcctcagtgccctccccagcacctctgggccttggaggccccatagcccctagaactctgcagcgtagtttgaaaaccactgagtttccctcctgctccgtgatttctgattccctgacctgctgtccctctccccagtgttgccaggcccctctgacagcacagacccaaatgaccccggcccttcctcactccatgtggaattgcctgctgtgatcccgaatgtcctgtagccccttgactgtgcaaagattccaaatagaagattggctgcccttgtgggctgcatgggttgtggatttctcattttctaccccccgtttccgtatggcacgcttatgtgcacggggtgggtggcccttatagctccctgagaagagtttctgcttgattgatggagaaacagaggcagggtggttgaatgaactacccaagatggcacaacagctgcgagtggagcctctttctggaactctcttcctccccttgccccagactggggaaggagccccagatggcagcaatacaaagagagaatctggtaggtcagttcccctacctagatgggctgagcgccccaggaatgggtgcagcatagaggataggagaaggcagaccgtgtgggaggcctcaggctgaggccagctgtgacctagaggattagggtcggacgctgggtgctggtgcgattaaaggccgaggcaggtgggcgggccagctcctctgtgtcttccgctcaggctgaatgtggacttggccgcccctccctccaaggcactgagccctattcaggaggcagcttccaggacgctcccaggctcctggctccctgctgggcccctacggcccattcacagcccacattctaacggctgccccgaccagccccagagcagccccggtcaggccgcctcaatcccacccagcccagaccccatcaggagcacctcactaccaaagtgggtgaatctggggcacagtgcctgggggaggggagcttcaggaccagtggcacggtattaacaaggaaattgcattgatggggcttgttttcccgaaagctccaaaccacagtttggatctgcctaatgatcccagtcctccttaagcaggctgtgaaggaggaggaagggtaggatatgtgcccagagagggtcagccacacccccatcacagtaggatgctcccagcttcgcagcaagggaagctggtctggcctccgagcccaggccctggtgagctgctgccctgcgagaggaaggtagcccactttgtagatgaggtagttgtggctcgggagtttgctgtaaatgacacaaaccctggttagtggtggagacaagcatgaggtttgccttgttccttgctacccctgagtgaggggtgcagcctctgttagaaactcccagcttccttctggggcaatgggatgcacctctctcctgctttctgtgcactcatgctctctctggctctctctgtctctttctccctttgcctccctttctctctcccccacgccccatacccaatgtcagcacctgcccttgctttcatcttcctgggggtggggttgggggttgaaaggtgtcctgtgcattcatggagcccaggcagccggcccattgctgcctctccctccccctgccccagccgtcctccatcctccgggcatccccaaggcctcattattagggtagcggtgaccccgccccccattgtctggccctgccatgaaaggtagagttttggcagagaaccgaggctcggcctgattccagcttgttctctgctgtctggagcctgttactatgcttggggcagggcaggcaggccctggtgggggtggaggcttgagccacagggcagccatgtcactaggacaacagcagggagcactggagggggagattgagggggagagcaggtggctctttgtctgcagcctgatcccagcacccccactgcacccccaccccacggccctccccagcctgggaggcagcccctaggaggggattggtgcttgctcccagggcacgcaaagtcattgggctcccttctctaggccgaggcaggagagactgcacaagctgtgccgcagaccaatggccctcctgcagcccccactggggggctccccaggactccacctgctccttctcagcccgcaccccaccccctatctacccacccagaacaggagggccaggctagtgagaccctgtgatggagtaggggttggcacaggtggcttgtagagatgggaggggtcccaggcaccaaagaaacagaccctccctggctgtggttgccacattccctctccagggtccatttccttagctgagcaatggaggaggtcagagctgttgctgtccggggctgtttcctgatttaaaaatctctgcctatggtagggctgtgagactcatggagccccttcctctcctgggcccacactcacctatttggtccttaaattttgttcctgggcatcagagcagtccctggagctggaggtcagtggcacctggccatggcttagaggagtgctcagctgtctggaggtggaatcctggctctgccgcttgccgggcaaatcacttcacctccccgtgctaactcttctgtgcctctatttcctcgtctgtaatatggggacatggataggatctgctacataaagttgtgtaggagtcaaagacattatatgcataaggtgcttaaacagtatttggctccatgaaaacactcagcaaatattaggtgtttttattcttcaagatctttactgagcaacaagtaggtgagtttcctgaaatacttggtgttgtgaaccaaacagatgtcatccatgaaacctggcattttggcttgaaggtgggagatatacagatttaaaaatatgcctcggggccaggcatggtagctcatgcctgtaatcccagtactttgggaagctgaggcaggaggatcacttaagcccaggagttcgagaccagcctgggcaacgtagtgagagcccatcactacaaaaaatttaaaaattcgctggttgtggtggcacacaactgtggtcccagctacttgagaggctgaggtgagaggattgccgagcccaggaggtcgaggcttcagtgagctatgatggcaccacttcaccccagcctgggtgacaagagtgagatcctgtctaaaacaaaaaacaatagacctcattggagatgtcctttcttgttcaattctgtggagattttttttttcttttttgagacggagtctcactctgtagcccaggctggagtgcagtggcacgatgtcggctcactgcaagctccgcctcccaggttcaggccattctcctgcctcagcctcccaagtagctgggactacaggcgcctgcaaccacgcccggctaattttttgtatttttattacagacggggtttcaccgtgttagccaggatgatcttgatctcctgacctcgtgatccacctgcctcggcctcccaaagtgttgggattacaggcatgagccaccgcgcccggccttctgtggagaattgaaatagcccatgactgagactcctgactgttgctctttgattttctcagaaatgctacacacagaatccactttcctaaaatagccttcattgaccatctagaaaaggcgaaaacgtgggtttggtattccggactccctcgtcatgcacacacatacatcctcaatgtctgtttgccttttaaacaactcacagctgcatctccaggatgcagtggagtcttatgtagggaagcaccttctgaacaagaaagctcctggcgtccaggagatgcttggtgttaaaagtgttgctgtgggcattgggtgggctccgtgaggaaagggatagaaatgataaggtcttctctgggagaggtgactaagatcctgccttttcttcttttttttttttttttttttttgagatggagtctcgctgtgttgcccaggctggagtgcagtggcgtgatctcagctcactgcaagctccgcctcccaggttcacgccatactctcctgcctcagcctcccgagtagctgggactacaggcgcacaccaccacgcccggctacttttttgtatttttagtagagacggggtttcaccgtgttagccaggatggtctccatctcctgaccttgtgatccgcccgccttggcctcccaaagtgctgggattacaggcttgagccactgcgcctggcccgatcctgccttttctaactgaactgatgaggcttttcatggaaaatcagtgcctgtctgttcatctgaacacccactagttattcatccaacaaatcttgattgagtgctgataatgccaggctctgtgctaagtaccggggataagttgtgataccgacccgcgaggcgccgcggtccaaggaggaggcaaaagcagacagacatcagtgtgggctggaggcccagaggtctggacagaacagagggttccgtgagaacaggccatggctgaggtgagcctgccaagagaagggcatatctgagtagtcaggaagggtgagtcggagtcttccagggagacggaggaagaaagggaatcccaggcagagggacccacgtggtgcaaagctgcaaacgatgaaagagcacggtgtaaaacacacagacgcgcactcctactcatgcgcgcgcacaaacaccccccaaacaaaacaaaaaccacagagcagagtgtctctggggagccccaccaatcctccccgcctgggtgtgtgggaggggccatgggagggcggccaggggcagaaggacttgcaaggcagtgcttcttgctccccagggccctctggcatcccccctggggtccctctggcccagtcccctttccctttgccagtcgcagctgaaatgtccttctcctgctgtcctctcacccgtcccaggccccagaagtttctcatcttcctgcactcattgccttttcattcgcacttccctctccatggtgagaggaggcggtttaacctctctgagcctcagtttccttatccacgtgagatggttggattgggtgatcctgaaggtctgcaggtcctccaggacattcctatttagatgtttcccaggggggtccttggaaatctcccagacactgagcctctgccaggggctggggactaaagccagtgaatagtggtggagatcagggcacccacatcagtgtgaagaggaggtggtgccctgctgaccctgctgctgtctgcttttccctcagtttgaccctgggaacacaggctacattagcacaggcaagttccggagtcttctggagagccacagctccaagctggacccgcacaaaagggaggtcctcctggctcttgccgacagccacgcggatgggcagatcggctaccaggattttgtcagcctagtgagtgctctggggcccttggtactcggggggacctgtttgagggttatggcttccacacatttaaaggatttaggcaattcaaaggatctgttggcctgcagcattgaaaaagtccaggcttctgaggtgaaagggtgccaccaaggactcatcttctctttgtctctaggctctgccctccgcagtgtcagcccatcctcaaggcagcacctggcaatttcagaccctcctgttgtggcagcaaagtggctgcagctgttccagccctcataccctcaggctgcaccttgcagaagggagggagggagggagagagagagggagggagggatggagggaaggggagagagaagaggaggggaggggagagagaggagagagaaacccttcttggtgtagctcttgcacaaggcctggtattttctccctcccattggcctagattgggtcagtaggatgggtagattgcgttaaatcaatcattgccccactcctgtagctgagagtggggtcagttacgccaaaatgaagggctgcgagtaggtagggtattggtggtaggagaaggggctggggagtgggggccgggagggtcagtgcagcatgtggtagagccagagctcagcatatctgctcagccgatgccctgggctgccaaagaggctggagaagataggcccatggatcctgcccagcggtctgttatctcggagcagagacttcccctcactgagggttagtgctgcgctatttcaggggctgctgtggactggggttcagtggggttaagcaggcagtatttcacccaccatgggatgcaggtgacatcagtagaaaagcggggtgaacaagcaggttgaaaataagacccaaagtttttgctgggttttcctattggtgagatggagctggtcacctctcttcatgtcacccatggagggagcgagagtgaaatgacttgtgtgaagcgccccagactcctaaattcaaaggcaccagtgatgggggagccgccaccactggagcctgtcattgtgccacatgagcgctctgatgtggatgcccaggcaggggagatgtttcaacagcctcttggctgaggtccagccttggtccaagggttggcgtgattgcaaggagctgctgtggggtttttaggagtggaggaatcgactgctgttcagagtggacccggggagcagacctcctggagagcaagggacagagctgagctgagcaggggagggggacagtgaggattcataggataggcagtgagggtgagtcctgtgacttggaacccagcagtgccaccaaagaccaggccaaaggtttgagcctgcccaggctcatccacagccacagccccagcacctgtgtgtttgctgcaagatgccctgctaggtcttagggcacgtggggcccaggagtggcttctctccagccaggggtcaatggagcctctgtgtgagctcaggacagcaagttacttgttactgctgggatttctgagatttctctgttcaaattctgcactggatctgtatgagcagggctgccctggagagcagacaaagggactcaccagaggggaagctctgagtagagcagagagctgaggacctggagtctagcaaacccgggtcctggtctggctctgcctctgccactcactgggaaagagcctctgagcctgccttttcccatttgtagaatagatccaaaggatcctctctttagggttgttgcaaggatcaaaaaaagtatttgaatatttttgatgtctcttaatgttcttccaccaggtaaactcctctgcatcctttgtgagcctttatctgctcaagccaggcagagtgagtcagcctttttcagagctcccacagtgccttgcccaggcctctctcgtagtacagaccgccacactgcattacagctgagcaacccgggtagtcgtgtatgagtgtgcaggttgtatactgtacaatggtgcctagctgagagatgatggagactgaaatctggcccggactttgcccaccaaggcctggcatgggtgcacccatccagaagaagaggctcctttatctgattggcacaacagctctgtatgggctagcatggactgtggagtcaggcagatctgtatttgaatcctgactctgtggtttactaagtatgagtacccggggaaactactcaccctctccaagcttcagtccccatatttgtaatgtcggaataatacggggtgccaaataactatgatggcacccttttttactgtttttacacttctgtctccacttgtaagctccatgaggcctgggaccatggtcatggactgtgcccagcacagcactgggcatgtgagggacgcaggtggatggtgagtgtgtacccctgctgagccagctcccaccacgggtgctgtgcactcccctgtgcaggtgcatcctcagggactgggagagagacaggtgagagtggccacaaaataatctgacatcgtgatcctgtcttgggctcacaatgtgcaccaggcgcctaaccctggcctacatttacagagctcctgggccattgagaagaactaggtccaagctttgtaggcatggagagaatggggatagagaatggttggaaaaggttcatctgggatggcctgctggagggggcgagctttaagctagattttgactatgagacaacagagctcaggaatgtgaggtggggggaccctatagatggaagttcacaccacctggcctggtctgaacctagatcctccccagccatctgccctctgacagggcctacaacccctgtgccgtggtctggcctggtttacctcaccagcccacagggctcctgccttcgggtttagcctgatgtctactgctgggcctagagtcccaggaatacactgataatccccacaccagcaaacatagggacagctgaggtgtgggcttgggagagccatatctctaggacttctccccgtaagaagggtctacagttggccgtggaaggcaggtgggaggtaacggaggcctcgggaggccaggagtcagcaaggccacctctggtctccgagtcaggctgaccactgggtgaggctgccagagctctacccagtatgtgtcagagaagcttcaggccgctgaggatagagctggtccccaggtggagctctgcagccagtctttgggcttgctgggcattccaggtcctgtgaaggccctcgggagtggtgaccttccccaggcacagcttgggttttggctctgggtgcctctctgcaaacccatctaaccaagggctgcctgcctcttcccaagctagcgtgtctgagggtgctacctcctgctcatcttttgattctcactcagacttcacctactccaggaagccttccttgacctctgacctccctgggactggattgggctccctcttgtgtgctcccacagcaaccatcactctgaactgtgattgctggttactaatctgtcttgagcaccaccgtatccctccctgtgcctggtaatgagcctgacacttagtagttgctcagtaaattgtgatggatggatgatgagtgagtagatgaaggaaggtatagtgaacacaaatacgggctctggagccttactgagtgtgaacttgatggattcctaaagctctcggtgtctcagtttcctaatccaatagaatggggatgttaatagtccttatctaacgggaagactggtgatcatcaaatgagccaaaagacgtgaagggctgagaataataacccctgacacctaacaagaccttggtgaatgttgcttcttattaacaattataggagaaagggaaatgcggggtcaggcctggtgcaaggaacatgctggctgggaagtgggtggggagctccgctgggccccagctctgaccctctccccactccatttcctgcacagatgagcaacaagcgttccaacagcttccgccaagccatcctgcagggcaaccgcaggctaagcagcaaggccctgctggaggagaaggggctgagcctctcgcagcgacttatccgccatgtggcctatgagaccctgccccgggaaattgaccgcaagtggtactatgacagctacacctgctgccccccaccctggttcatgatcacagtcacgctgctggaggcaaggacaagggtggggagggggttgctctgccttggggagtggcgggtatggggagaggagccaagaggatgacacacagatcatgggggaagagggacatttcttttccattgaagggcaatggttgaggatcaaataatagttgtattgcaaatcagactctgttgcggtgcataccagtgttgtaaccgtggactgcaaagagatattccaaagattattacttcaaacaatacttactgcagccaaatccccgtaggaccactaccccccacccaccccaaaacaacagcaataaaaacaatgtcataagttcattgacttgggagatctagccaggctaactcattaaagccagtttatttagttcctccctaggtgggtaatgtggaccagtcatttgctcctttttcccgcctgaaaatcagaaataaccagacctgccttccctctcccaggacacctttatttaaagtgagagaatggctactggtgctttctgaacacaaaagcatcacacaaacacatctgggagggagtgtgaacaggtaaatatgggcttaacatttttaaagaacattctccccttagggaatcctctgtgcctattgttatgctaaattctactgcttatgcaacagaatccaaaggtaccccttgctgcgttggtgcccatgtgtgataaaactcaattcttttgggtcctccactcaacaacctgtgcagcccaccccagctgcagctcctgaatggatgcttggcttcactttgggattttatgatctccgctgtttctcttccaaagccacgggcctaattaccgcctctgcatatgttcttgtaaagttcctgcctaatcaaaagcttcgcggcatccttcttttcttctaagtcagaatatctggtctgcaggccagcattcccctgtttgttgttatggcttcatccaagtacatgttgaagttgcgatttttctgagatattcttggactcgttcttcaagcgcttactgtgctggtctatttattaacttctgtttgaggcccaataataacgagatgccttggaagcaggatttgctaccaggccaccctcatggtattaggtggacagaacggctcctcagagagcccaggagaatacagctaccaggggcctaagccattcccaggctgagcccagaagattttaacccaacacgaattatagcttccttctctaagtgtgtgccgggcagggggctggctctttgtgtatagtttatcacttttaaacctcctggccactctggaagtctaggtatcggtacccatttccagataaagaaactgagggccagagaattcagtttgcccaggttgatcaagaggagcaattttgtgtccagattggttcagatgaacctcagctatgtaaacccgaaccaccaatctagaagaaactgggaagtgatcaaatagctgaaataacgatctcgaagccctggggctacaatgcccaaggcttttgtcttctatacagttctggtaacctggctttcggatttcataatgaatagaaaataggagggacatggtgtaaagcaacaaaggggtccactaccagcaagcaataagaaacagcagccgacagcctggcagtgaaggaagtgacaaaagaaaagtttaaagcagacctgaatcttaaagaaataaaagaattggctgagtgcagtggttcacacctgtaatgccagcactttgggaggtcagggtgggaggatctcttgagcccaggaattcaagatgagtctggacaaaaaagtgagactgtctctacaaaatatcaaaaaattagccaggcatggtggtacatgcctgtggtcctagctacgtgggaggctgtggcaagaggatcgcttcagcccaggaggtcaaggctgtagtgagctgtgtccatgccacatcactccagcctgagtgacagagcgagaccctgtctcaagaaaaaaaaaaaaaaaaaaggaaaagaaatacaagaatttgggggattggccggacgtggtggctcacacctgtaatcccagcactttcaaaggccgaggtgggcggatcacttgaggttaggaatttaagaccagcctggccaacatggtgaaaccctgtctctactaaaaatataaaaattagccaggcatggtggtgggtgcctgtaatcccagctactggggaggctgaggcaggagaattgcttgaacccgggaggcggaggttgcagtgagccaagatcgtgccactgcactccagcctgggcgacagagcaagactccgtctcaaaaaagaaaaaaagaaaaaaaaaaaagaatttaggaccttgagtgtatgagcaaaaacactatcctggccgggcacagtggctcacgcctgtaattccagcaccttgggaggccgaggcgggtgggtcattgaggtcaggatttcaagaccagcctgggcaacgtggtaaaaccccgtctctactaaaaatacaaaaattagtcgtgtatcatggtgggtgcctgtaatcccagctactcaggaggctgagacatgagacttgcctgaactcaggaggcagaggttgcagtgagccgagactgtgccactgcactccagcctgggtgacagaacaagactcttatttcaaaacaaaaacaaacaaaaaatgtcatcttcctggggttgctggagaaacaaatcactcttatagcccagatcaatacctgagatattcctttttttttttttttttttagacagagtctccctctgtcacccaggctggaatgccgtggcgcaatcttggctcactgcaacctccgccggctgggttcaagcaattctcctgcctcagcctcctgagtagctggggttacaggtgcctgccaccacgcccggctaattttcatatttttagtagagacggggtttcaccacattggtcagtctggtctcaaactcctgaccttgtgatctgcccgcctcggcctcccaaagtgctgggattacaggcgtgagccactgtgcccagcccatacctgagatattcttaaacagttatgcatatgccctgattaagaacacagggacgtaaatgatacattttagaaggagtcccagaaaaaaaaaagagttaaatacccttttagagattaaacaagtatgcttcagtcacgtttgcaaaatcaacttctgtggaatgttggtgagaatgtggagaaattggagcccttgtgcactgttggtgggaaagtaaaatggtgcagctgctatggaaaacagtctggcgttgcctcaaaaaattaaacatagaattaccatatgatccagcaattccacttctgaatatatcccaaaagaattgaaagggactggaagagatattgatacacccatattcataatagcattattcacaatagtcaaaaggtagaagcaacccaagtgtccatcggtagatgaatggagaaacaaaatgtggtctgtgtttatagtggagggctcacgctggtaataccagcactttgtgaggctgaagaaggtggatcacctgaggtcgggagttcgagatagcctggttaacatggtgaaatgctgtctctactaaaaatacaaaaattagctgggcatggtggcacacgtctaatcccagctacttgggaggctgaggcaggagaattgcttgaacctgggaggtagagtttgcagtgagctgagatcacgccactgcactccagcctgggcgacagagcgagactccacctcaaaaaaaaaaaaaaaaaaaaaggaagggaaggctgggtgcagtggctcatgcctataatctcagcacttgaggaggcaggaagatcgcttgagcccaggagttcaagaccagccaggaggtagaagttgcaagctgagactgccccactgcattctagccagggcaacagagtgagatcctgtctcaaaaaaaagggggatcattctgacacatgctacacaacatggatgaaccttgaaaatattataccaagtgaaataagccagacacaaaaagacaaatactgtatgattccacttatatgaggtagctagagtagtcaaattcatggagatagaaagtagaatggtggttgccaggggctggagggagggggtggggcgtcattgttcagtgggtacagagtttcagttttgcaaatgaagagttctgtggatggatagtagtgatggtagcgcagcaacatgaatgtcatttaatgccactgaactgattaaggccgggcgcagtggctcatgcctgtaatcccagcactttgggaggccgaggtgggcaggtcacatgaggttaggagttctaaactggcctggccaacatggtgaaaccccatctctactaaaaattcaaaaatcagccaggtgtggtggtgcactcctgtaatcccagatacttgggaggctgaggtaggataatcgcttgaacccgggaggcggaggttgcagtgagccaagactatcattgcactccagcctggacgacagagcaagaccctgtctcaaaaaaaaaaaaacccaaaaaactgattaagatggtaaattttatgtttatttcactatagttatttaagaaatcaagctatgtggaattcgtcatctcccaagtgggtgcgtgagttattactggaattaaagttcaaaatcctccaaatcctttctgcttagcacggaggaagtgtggacaaagagaccccaggaccatgttgcggccatttgacacaaaataagcaaacagaagtgggtgaggggtggttaaaagctcagctgagacaggcacagtggctcacgcctgtaattgtagcactttgggaggccaaggcgggtggatcacctgaggtcaggagttcaagaccagcttgaccaacatggagaaacccagtctctactaaaaaatacaaaattagccaggcgtggtggcacatgcctgtaatcccagctactcaggaggctgaggcaggagaatcgcttgaacccaggaggtggaggttgccgtgaaccgagattgtgccattgcactccagcctggacaacaagagcgaaactccatctcaaaaaaaaaaaaaaaaactcagttgggccctggctgtggggtatccctctttctctgagaaggaaaggtgataacttcctgtagggactcccagtgctagtcagcacaacaggaagtttcctgggcagtgtgcacctagtaacagactctctctcttctgtccaggttgcctttttcctctacaatggggtgtcactaggtcaatttgtactgcaggtaactcatccacgttacttgaagaactccctggtttaccacccacagctgcgagcacaggtttggcgctacctgacatacatcttcatgcatgcagggtgagtacctgtcttcttttgctctgtcaaaagaccctacagaaaaataagtggtcaagatagcctggattgaaatatagtttttagtttatttttatctatttggacataggatttgggatggctgcttgaaactcatttaataccaaaatatacaagtaaattattgagagtgaatgggaaaggggaaaatatataagaaggaaaatgctaaaagccagcagtgagaacagcacacacatacacagcatttgattctatgtacttgctagacgtggcttgaaaatttattctagtgcttcctagtggcttcctagagcttttgctttggccactagagcaaaaagggagtcaagccaccagatttattgtccataactgtgtgtgagtgcctcccagtgtggtctccatatatagagagggtcttcttgaggaactctgacgataattatagtttctgtttatagaaccctgtagcctgttttggggctgcagcacaatcggttctcactggtgcctcccacttcatgataagggcctaccagctggccaggtgaccacccaggtccatatcccttgaagagcagtctggaggcttttatatggtagaagcactttgatgggagaggagagaccccagacaccaggcctctgtggtgtcttctcttctgtagcctctccagagaagtgaaggagctcacagttagcctggggaaaaccgtgggggtgcctggccctggagtgggaactgggaagggggtcactctggccccaatgacgccataattcccattgctcagcagaaagacccacaatggccaagagggagttgtcccatgagcctcccttccccttagcctctaaagcaggtgcaagagctaatcccaaattggctgcacctgcgggggagggtgctttcgggtgaagagacctgaatgaacgcctctgctcaggccaaagaggaccattggtacatgctgcttaccttgtctggcttgccccaggcttcgatcttacagggctaaggagcagcgggatggctgtcatgcttcactcacatccactcatgagccaggggtgacaacagacacgggggcttccctgcccaggcatcccaagccagtggctgcacgtgggttgggactgtctgccttctttccaggactgccccctgacctctcttggtgcctcagggtgaggaaggagaatagccaaagcctccttgctccatcctctgcctcctggagccaaaagcagtgagctgagggcatctgagccctgtcccaggagcttcccaggggatgtcagctcaatttaaatgagacagtgggtgttaaagtgctgtataaagttggaagcacctgattgatttagtaatagtcatgttacagtcttttctggtcacatgcacacagctagatgccccacaattttagcagcaagatgtagtcacaggtagtatagggaggaaggtgttcacagggtcagaaaacctggggtccagccgggcgcggtggctcacgcctgtaatcccagcactttggggggccaaggcaggcggatcacgaggtcaggagatcaagaccatcctggctaacatggtgaaaccccgtctctactgaaaaatacaaaaaaattagccaggcctggtggcaggcgcctgtagtcccacctactcgggaggctgaggcaggagaatggcatgaacccaggaggcagagcttgcagtgagccgagatcacaccaccgcatggatggtgtgagagagactgcctggatgacagaaagagactccatctcaaaaaaaaaaaaaaaagaaaaaagaaaaaaaacagaaaacctgggatcccatatcctagtcctgagggttttggagcagaataggtctcttttttttttttttttttttttgagatggagtctcgttgtgtcacccaggctggagtgcagtggcgcgatcttggctcactgcagccaccacctcctgggttcaagcgattctccttcctcagccccctgagtagctgggactacaggtgcatgccaccactcccagcttatttttgtatttttagtagagatagggtttcaccatattggccaggttggtcttgaactcctgacgttgtgatccgcccacctcagcctcccaaagtgccaggattacaggcttgagccaccgcacctggcctagatctcttcttataccagtaaagagaaacctctcttatgagactttaagggaaagctttgaattattaagttataagatgtatatttaatgcctgcacttgttttgagaacatatttttctttaaacacccgtagctcttttttattttattttattttattttattttattttattttattttattttattttttgagaaggaatctcgctcttttgcccaggctggagtgcaatggtgcgatctcggctcactgcaacctccacctcccaggttcaagctattctcctgcctcagcttcccgagtagctgggattacaggcacctgccagcctcagcttctctagtagctgggagtacaggcacctgccaccatgcctaattttcatatttttagtaaagacggggtttcaccacgctggccaggctggtctcgaactcctgacctcaggtgatccacctgtctgggcctcctgcagtgctaggattacaggcatgagccaccacgcctggctaacatccatagctcttacaaatagagccagaacatggccaggcgcagtggctcatgcctgtaatcccaaaactttgggaggccgaggcgagtggatcacttgaggtcaggagttcgagaccagcctgcctaacatggtgaaaccccatctctactaaaaatacaaaaattagccgggcatggtggcctgtaatcccaactacttgggaggctgagacaggagaatcgcttgaacccaggaggcagaggttgcagtgagctgagatcatgccactgcattccagcctagttgacagagcaacactccatctcaaaaaacaaaacaaaacaaaaacaaacaaacaaaaaacaaagagagccagaatgaccacatggcccagtgaatggagcaggtcaggcagattggagacctgaactgttgtgtcagcgtggccactaactgtggctggtcactatctctgaaccttggtttttcacatgttaactgatggagttgctggatctttttttttttttttttttttttttttttcagagatggtatctcactatgttgcctaggctgatcttgaactcctgggttcaagtggtcctcccaccctggcctctcaaagtgttgggcttacaggtgtgggccactgcgcccagcctagttgctggatcttgactgtggttagtctgtctcactgtgccaagtgaaatgctgccagtcacgcccaggccttgcacatctgttcctgtcccatctggaaggaacactctttccaagatggtctgtctgaattgtcattccttcccctagaccatgagctcctcgcaggcagaggtggtcttgttcattgctggatccctggcatcttgggggatgcaggtgtttgttgaatgaatgaatgaatgaatgaatgaatagatgaatgagtgagtgtggtctctctgtcacaggatagaacacctgggactcaatgtggtgctgcagctgctggtgggggtgcccctggagatggtgcatggagccacccgaattgggcttgtctacgtggccggtgttgtggcaggtaggcaggtaggccccgtgtccacaaaggcacactgccccagggtggggtgggagaccctgtggggcggggcaagccccaggtttccaggacacacagaagatcctcatctccaaggctcctgacttaaccaggctgtcctccaggcacacccacctccctatgaggctggagaacggactgctgcccatagagggaggtgtgtggcaggacgggggaggagagcactggatttgggacaggctggacaaccgactctcggtctcacaccaccatgtggtagctctctgagcttggggaaatttcctaacctcttttggccatgttaagctttaagagggaactaatgagatctgcctgtagggttgccaggagggcagagtgagtgaggcaacagatggaacaacagtgctccgaaaactgcaagggcacagtgagatccccacaggggaatcaaaggggtgagtggagccaggtaccaccctggccacgtagcacctgtccccaaaaagagagctggctgctacccagaccaaccgcagtccccttgcctgacccactgctgacagggagtctgacctaagaggcagtgagccctggctccatctgaaggcatctgggcctccagctgagtgggcacacgtgtggccagtgatcatccttcatggatagtggccagagtgactcccagtgagccttccaccttctgccccctccccagtgggaggtgaggtgggtgaagttagctggggagagcacggatttctgcaggaagcgtctgccagccaggcctctgaacatgaggatctccctcgtgatgtctccaactttattgccggctgtttttttttttttttttaacaaggtttgccgcctcagctcttcagcttgacagctgtgcccaagggagctttgtgtgtatgtttaagtaagatcttaatcctttctgagtggtattaaagttgtcatcaggagagccgggcagcgtcagccttgtaaacaacaggcaggcagggaccctgggagtaactgaagtggtttcagaaatcaaagaggaagggtcccaccccacccacacgaggctggtctgctagtgcatgaacccttggcctgggagattcaccctgcaccatctcctttgctcctgtatgcgctgaggttaaaatcgttggccaccttggtcagcacccctgcaagcccctcccagaatccaaggctcaccacgtccttgaataaagggctaatgagcatctctaagtgccagacttgttcagccacccacacaccccctaatcctgacatctgaggattgatagcctcattttccatacctcaatacccagagacccagatgttaaatagcaaggaacagggaagacattaataacatttgcagttagtattcaattagatgggaatgccaataacctagaagacaaaaataagattcaaatggactcagacctcacccaaaccaggtgacatgcagtggggagacagagtaggtgtcacctccccagtgacaccagtgcagagtgggaagattcaaacagaagcagagctcatcacctgaatgtgagcatgtagggctgtatcattgagcacatggcgtgcactgttctgtctgagtcagtgattaagaccagagggcactctggtcaccacacatgtcattgatctccatgattgagttgattgatctgtctctgctgtctaccctttcctgtcctcccaagctttcctctgagaggtgagccggtttacagccagccagccctagattggacgggtggcacttatcagtgcctaccatatgcaggccgtaattcatccacacagcaacgctacgaggtgggcactgctgctctcccccagcacagatatggaaaccaaggcttagatggctaagtggctcgcccaagaagacacagctagaaagtggtggagctgggcagggtctgacccccaaggctgtgatctcaaccactataatagtatgacgagaaccaaaaggtggtccttgtcctttttgcagttaatttattgtcagaaaccaaggcagaccaggtgcagtagctcacacctgtaatcccaatactttgggaggtcaaggcaggaagatcgcttgagcccaagagttccaggccaagctgagcaacatagggagaccctgtctctacaaaaagttttttaaaaattagctgggcatggtggtgtaggcctgtagtcccaccagctacttgggaggctgatgcaggaggatcgcttgagcccagaagtgcaaggctgcagtgagctgtgataacaccactgcactccagcctgggtgacagagcaagaacctgtctcaaaaaagaaaaaaagaaaaaaaccaaaggagaccttaatagatgtctggcagccttactctctaattccttcccagtgaaagtgtttccaatccacactttgtaatgaggatagctaacctctatggggcatatacatgctccaggcatatgatgaggggtttgcggatgatcgtggatgctatgctcatcactgctgtcctatatggtgggtactaccactcccattttacaggcagcccagggaggtgaaatgacttgcagatttgcttacctgaaaagtactagaactagggaggagcccttcccaagccctgtgcttctttccttttttttttttgattttgagacggagtctcactgtgtcacccaggctggagtgcagtggcatgatctcggctcactgcaacctccgcctcttgcgttcaagcaattctctgcctcagcctcctgaatagctgggattgcaggtgcccaccaccgcgcccggctaatttttttgtatttttagtagagacggggtttcaccgtcttggccaggttagtattgaactcctgacctcatgatccacccgccttggcctcccaaagtgctgggattacaggcgtgagccactgcgcctggcagccccctgtgcttctttctaaccaatgcttgaggccaatgtgaaaatcacttatggctagcaattatatggcacacaatgtaggtattttaaaaaccagtatcttgggccgggcaaagtggctcactcctgtaatcccagcactttgggaggctgaggtgaggggattgcttgtggccagaagtcaagaccagcctgggcaacatagtgagacccccatctctaccaaaaaaaaaaaaatcaatatcaccaatcttatattatagattatatagattactaaccacgtgtgcatccccagggcctagcacagggcttggcacatgttaggcaataaatatttatagaataaaggaaagttggcgggcatggtggctcacacctgtaatcccagcactttgggaggccgaggcgagcagatcacatgagatggggagtttgagaccagcctggccaacatggtgaaaccctgtctctactgaaaatacaaaaattagctgggcatgatggcagccacctgtaatcccagctactcaggaagctgaggcaggagaattgcttgaacccaggaggcggtggttgcagtgagcagaaatctcatcattgcaccccagcctgggcaacaagagtgaaactctgcctcaaaaaaaaaaaggaaagatacgtaaataaagttacattacttaaagataaatgttctgccaatttttatttggattttttttaaggccaaagaagatgttgaagaacacctgctttaaaattttctgggctaaaattatcacagctgtaccttatggcaaagttgccagtttatctgtgtgctggcatgacctcagaattttggggtgcaggatacagaatttgtaatcctgatgagaactaaggcccatggtttgcctctgtgcagaggtgtggcatgtcactccagtttgccattctctcctagtcctctgcctccatgacctctgtggaattcatactggtcttatctgcctgtacctgttaggattgttcagagctctggaggggattcctccctggcccacacttcctgcccggggagggcctttattactgtgtttatgtgtacacagccccatgtttgtctttggtctctcccagttgctctagtccaggcctcacctgcagtcacttgaaagtctgcttttttttagttttttggagttttttttgagacgaagtcttgctctgtcatccaggctggagtgtagtggcacgatctcggctcactgcaacctctgcctcccaggttcaagcgattcttgtgcctcagcattccgagtagctggggggctatatgcatgcgccaccatgtccagctaatttttgtatatatatatatatatatatttttttttagtagcaatggggtttcaccatgttggctagattggtctcgaactcctgacctcaggtgatctgcctgcctcagcctcccaaagtgctgggattacataaggggtgagccaccccacctggcccaaaagtctttatatcaccaatgtgggggcaggtggattcaggccgttacctttgaggttccagaatcgggacccgagccgcggcccctggatcttaggccaagactcaggtcactgaatttctgatctggaaggaaccagggaggtcccctccagcactggcaaactgttctctaggccccatccccacttagccagagctgctgcctgtgttctgctccatgggttagggcgtccctgaaaagtttcctttgaagagagttttgctgctcaaaagtcagaaagccttagacctcattttatagacatgaaagaaaaccgaagcccaaagaattcagggactgtgcccaaggtcacacagctagctggccaggccccttccatactcctgccacaatcctacgctgacccctggccctagggtcaggactccgagccatggatagggtgagggaaaggtcagtgtgtgccagcttgaccctcgcaggggcccatccctgcctggggctgccctggggcggctctgccttggtggaccgtgctggggcaggggcgagggagtggactctgggccagtttgtacagacctgctctgagaagagaagccagcctagggaggctggggcttcctctgtccaaaaggtaattaatgaggagcagcttgggcagccagccctcattgtagccctgcaatgcagccttcgaagacagccccaccaggagagcgtgggaaacctttgtcatgcagatcctgctgcctgtttgtttgccaccctgggatttttctttcctgttatatatggctgaccctgtggctaagcagtaaaaaaagcaaaagcaaaagaaagttatctgacaatagatcaatacctaattaaagccagagggaaggcatgaaagatttatagttgccctggaaggggaggaggacttgggagtcctcagttcatgacaggttttttttgtttttgtttttgtttttgagagattacatcccccttgagaccaagaattggttgtggggactctctttcttgaaggagctcagtgagtaggggaggccttgatggaggtgggggcaggggaggtggaggagtttatcagggggctctgctgccaggtccttgggtgctctggttgctgggctgggcccagcctcctcctaagtccgtggatcttgcaccctatacagcctgcagaatttggctttctgcctgtccctcctttctccagcagctaattggctcttgagcccctgggcattttccagtggtaatttctgcacactcacccaggccagccacctctcatcctctgagccctgggctctacctcctagttatttttagtctcccatgtcctcccttggaagacaaagcattgatcacacttaaatgagaccagaacaataaatttcccctcttttctttgctcagcttccctcccaggacaaaagtttgtcatcccccagaccaagcctcgcatacccttcctttcccccagagggtatgacatcatctctctctcttccccatgacttttcaaggacatgtttcctccaaaggagccccactggagagatgctgttggccttttgtgatttagctgggctggaggaagggtggacgtaaccctaagcagttttctagatgctgttgaacagagggagagatggaagaaggtggaggttaacctctgggccagtttggggcgtggctgctagagaggccaagagtgcaggctttggtcaagaacacgggtgggttttgcatcaggcagacccagatgcaaatcctggttccggcacttcctaccaggagactctgggcttagtctcctcatctcaggaatgaggctactggcgcctgcctcagagggctgtcttgaggattgaagggaagaaagtctgtaaaatgtttgcttggtatccgtgtcacctaggtggcagctgtttcttcaataactactgctactatttttgttatggttccagaaccctgacatagcaccatgtcaggcagacattggattgagaggcagataatccaggtagaagtctgaattttactttgggcaggacacttccctctttgagtcaaagaatcaaatggttctttcagccagaaattaatcctctaagaaatgcactggaggcagggctctgtggctcacacctgtaaccccagaactttggaaggctgaggcaagaggattgcttgagtccaggaatttgagaccagcctgggcaacatagtaagactctgtctctactaagaaaaatacaaaaattagctgggcattgtggcgcacgactgtagttccagctacttgggaagctggggcaggaggatcacttgagcccgggggtcaaggctgtagtgagctgatcgtgccactgcactccagcctaagtgacagagttagaccttgtctcaaaaagaaagaaagaaagaaaaggaaaggaaggaagggagggagggagggagagggaggggaggggaggggaatctccctggcaacatggactcaaaggaggaagaggtggagcgtcttgctctggagtcttagcacggagcctgcagaatccaaggcctggggctgggttgggtgagccgagtcccgcactcctgagaattctcgctgtctttctgtactagggtccttggcagtgtctgtggctgacatgaccgctccagtcgtgggctcttctggaggggtgtatgctctcgtctctgcccatctggccaacattgtcatggtgagcacctcccgttctcaatgtgtctttctggccctgtcctctgccatcactgggcctgagtattaatccactggggctggctcaccaaaaaccaggcagacctgacctggagcagagttctcacacactcctcaccctctgcaggcccatttcaaatgagcgccttccagatgcgattcctattttctccagtcacggcttggcctaggaccatgcccatctgccccttctgcctctttcccattcaccaacgttaaagagttaacatttggtaccatcctggctaacgcggtgaaaccccatctctactaaaaatacaaaaaattagccaggcgtggtggcatgcgcctgtagtcccagctactcgggaggctgaggcaggagaatggcatgaacccaggaggtggagcttgcagtgagccgagatcgcgccactgcactccagcctgggggagagagtgagattctttctcaaaaaaaaaaaaaatttggtcactagcatatatggccattggaattgcttatttatcataggttgttaaaaatacaagggctttagagattatctcatcaaaattctcaaataggaaaggaggctgtgagaggttaagtgacttgtccaaagtcacagtcaagtttgtggcaaaatgagggcttaaacccgtatctcctgacaaccattcaagagtcatttcccggccaggcacagtggctcatgcctgtaatcccagcactttgggaggccaaggcaggcggatcatgaggtcaagagatcgagaccatcctggccaacatggtgaaaccccatctctactaaaaaaataccaaaattagctgggcgtggtggcacgctcctgtagtcccagctacttgggaggctgaggcaagagaattgcttgaacccgggaggcggaggttgcagtgagccgagatcgcaccactgcactccagcctgggtgacagagcgagactccgtctcaaaaaaaacagttgttcccctatcccagtctgtcatgggaggggggcaccactccatttctcaccctctgccttttcctgaaaggtagtacagtgtgatagtgaagaacatggtctttggagccagtcagcctaggtctaaatccctgctacactctgggcaaattacttaactgctttgcacctcactttctacatctgtgaaatggaatgggagctgggcacagtggctcaggactgtaatcccagcactttgagaggctgaggtgggcagattgcattgagttcaggagttcaagaccagcccaggcaacatggtgaaactccatctctataaaaaatacaaaaattagctgggcacggtggtgcatggctatagtcccagctactccagaggctgtggctggagaatcagttgagcctgggaagcagaggttacagtgagcagagattgcaccactgcacaccagcctgggaaacagagtgagaccctgtctcaatttaaagaaaagaaaagaaaagtaatagaatgacatacagtaaatgaaataaagtgcaaataaccacctatataaatgtaaatttaatttccttctcctgacagaagaggccaggatggggtcagactagacaaagccttgaaggccagaaattgggatctgatagtcttagaggatatcaaaatcctttttttggaggcggtctgaagtctgaaggctgatggaggagtcagtggctaaccctgcccgatccctctgctggcctgggagcctccgggtcttacttgtctatttcccagtacctggcatatggctgggagcatggtagatggtgcccactagattttagtgaatgaaggaaggaaggcatagcttttctttggggtcctcctgttctcacccactcctccatcagtgtcttcgcccacgtggcagatgtttgaatgctcaatgatcacagtgcacagggcttggcgttcctgaattatcccatgtttttcttccttatcaatctctctgtcacccaccctgctcccaaccctgtcccttttgttctcatcaaaatgcccattgtacattgagcaagagaagaaagagcacaagagggaggggaaaagaaaggaagagagggggagagatagacagacactgagtacctgcctatacttgctactggcctgaattttggcaccttcaggtgagtgctcagagagaggctgcgggtgttgggaaacgtggaacggtgagcctctcagtgtgtgtgtgcaggtgtgtttgcacatgcacacacttcagtttgttgaaaacctgagtgcatgggctgcctcccatggcccttttaaatgggtcattctgtatcagtgccacatctttccccagacacagcttttcctctgaattctgcctcctccactcccccctccccctgccccaattcctttcagtaggggaaggaaatgctaacctcctccctcccattccgcccaagacttgtatgtgtgtaggggtggtgaacaagctcaactgaaagagaacacagggaggaagaagcacgctggcattcataacgatgccctgttcccaccctcttccccacctcatgggaaacagccctgatggcccagaagttcccatggtgaaggcagaccactgaaggaccatggagtagggcacgtttgtcgagagaggtgtgagagcagttttgttccagttgatgcttctctctgtcaagtagcccatggcctgccgctgtggagatgagcagcctcatctgagagccccgtgccttccagaagcaaacggctttccttggccaactgggagctgtgcagtccccagagcatgacacatggggagcccttctccaggaggttgtgtgggttgggcgcgctggctcacacctgtaatcccagcactttgggaggtcaacacaggcagatcacttaagcccaggagttcaagaccagcctgggcaacatctctacccacctctaccaaaaatacaaaaaattatcctggtgtggtgtcatgcacctgtggttccagctactctggaggctgaggtgagatcacctgtggttccagctactctggaggctggctgagatcacctgagccagagaggcagcgggcagtgagctgagattgcatcactgcactccagccagggcaacagagtgaagccctgtctcaaaaaaaagaaagaaagaaagttatgtggtgtttattgacgatgaaagaaaactcatcgtctcattaaaaaggctggtttctctttgtcaagaggctacctttactcaaattagttcagtgctaagcagttcagagatgcgttgggtcgacccatatgaaatggccctttctggctgggcacagtggctcacgcctgtaatcccagcactttgggaggccgaggcgggtggatcacgaggtcaggagttcaagaccagcctgaccaacatggtgaaaccccgtttctactaaaaacaccaaaattagccaggtgtggtggtacgtgcctataatcccagctactcaggaagctgaggcagtagaatcacttgaacctaggaggcagaggttgcagtgagccgagatcacaccattgcactctagcctgggtgacagagagagagagaccctgtctcaaaaaaaaattgccctttctatgggccatcagcatttgaatattggcaaattcatatcgttctacctaatagatatactattgttttcagcttcaaaatgaaggtttggagtgtgtgtgtgtgtgtgtgtgtgtgtgtgtgtgtgtgagatacacagtaaagtacctcatcagaactaaaagtagaaaaagcatggacttgggctgggcgcggtggctcacgcctgtaatcccggcactttgggagggcgaggcaggcggatcaactgaggttgggagtttgcgaccagcctgaccaacatggagaaaccccgtctctactaaaaatacaaaattagctgggtgtggtggtgcatacctgtaatcccagctactcgggaggctgaggcaggagaattgtttgaacccaggaggtggaggttgtggtgagccgagatcacgccattgcactccaacctgggcaacaagagcgaaactctgtctcaaaaaagaaaagaaaaagcatggacttgagagaaaatccacatttgagtaccaatgtcaccatcttaatagctatgagtctattactcaacttcttggagccccagttgtctcatcggtaatcccatcttcacaaaacagttgtttgggagatgaaaaaatggacaaaatatttcaacaaaagatctggaatgcaaaaagccctataatcaagacttctttttttttttttttttttttttttttgagacagggtttcgctgtgtcacccaggctggagtacagtggcacgatctcggctcactgcaaccaccacctcctgggctcaagcgatcctcttgcctcagccccccgagtagctgggaccacgggctcgtgccaccatgcctagctaaccatgttgcccaggctggtctcgaactcctgaactcaagtgatccacccacctcagcctcccaaaatgctgggattacaggcgtgagccaccatgccccgccaagacttcttattttaaacactagaaatatacagatacacctaattgaataatttattaattgcctcctgctggccagagttccattttttaatctacaagatatttacttacacttcgctctgtatgattgatgttttcccaaaatgtttgaggtctgaattttcacaaactgaaccacattgtcaaagcacaagggaagatggttgcctaacagacactaaagatttctgttataaagtttactttattggccgggcgtggtggctcatgcctgtaatccctgcactttgggaggccgaggtgggcagatcacgaggtcaggagatcaagaccatcctggctaatacgtgaaaccccatatctactaaaaaatacaaaaaactggctggtgcggtggctcatgcctgtaatctcagcactttgggaggctgaggcaggcggatcacaaggtcaggagttcgagaccagcctggccaatatggtgaaaccccatctcaactaaaaatacaaaaattaggtgggcgtggtggcaggtgcctgtagtcccagctactcagaaggctgaggcagaagaatcgcttgaactcgggaggcggaggttgcagtgagccaagatcgtgccactgcactccagcctgggcgacagatagagactccgtctaaaaaaaatatatatataaaaaattagccaggcgtggtggcgggcacctgtggtcccagctactcaggatgctgaggcaggagaatggcttgaaactgggaggcagagcttgcagtgagccgagatcacaccactgcacttcagcctgggcgacagagtcaggctccatctcaaaaaaaaaaaaaaaaaaaaggtttactttattaaggaaaaatatttttgtaggacaaagaatcaactccctaatttatctgcgtcatactttcacattccctgtgttgggttttcttgaagtcatttcacaagaaaccgtttctaccagggatagatatagaaagctgtattggaatggaagctccctgcctggctttcagcctctgcactcttaacccgtttgggtgagcaagatgctgaggggactggttaccaacttgttcgctgtgggtgagtactatctcactctttgaggctctgggagaatgaaattaaagggcctgcaaaaggtttgtattccccaaagatctgcaggctttccagcttttatagcagcagcagtgctggctgcatgtgagattttttttcttctctcccgttgtttcagtgcactgattttattggcgggaatattggattagggaagtaaggcagctggttggaagcggggactctctagtttaacccctcggctgctgggaggcaggtcatatttactggcgttttttcgctccatttgtgggcagctgggacagacggcccaggcacatggaatgtgacctctgaagtgtgggtggacagagccctggaccaggagcccagtcagctcaccattcactcactgtgaccttgaaccagccctcctgaatcctcagtttcttcttccctaaagtgtgcggcagagggatggactggatcagcttggcaagctccagggctttcagggtccaggcagatgttgtaaactcataaagcgggcctgggaggtgctgtggcaaaactggagtcattcagattcagattttttcaagccactctgcagggcaaactccccgtctttgtctcaggtcaagatactgtcacacatttagatgatgcctactgtgtgccaggcagtggtcttagtgctttacatatattaattcatttcattctcacaaccacctgatgaggtggggaactgagataaggggcagttgttatctcaaattcacaaatgaaaatgacagagaagaaggaattctgagccaccccactgatggccaaccaggccaaaaataaggatggcgcatttaacatctatcccagatagggcccaggaggggcatggaggctggagacctcagataaaggagagagctgtccatacattctaacttactttgcctgatattatcactcaggacatagtgaaagagacactgtcttcagataagatattcacttaggccaggcttggtggctcacgccctacaatcccagcactttgggaggccgaggaaggtgaattgctcgagcccaggagttctgaaccagcctgggcaacatagggagaccccatctctacaaaaatttaaaaattagccgggtgtggtacagtgtgcctacagtcccagctagttgggaggctgaggtgggaggatcacttgagcccagaaggtcaaggctgcagtgagtcgtgatcatgccacttcactccagcctgggcaatagagtaagaccctgtctcaaaaggaaaaaaaagaaaaataataagatatttactcagagggggccgagcacaaatggctcatgcctgtaatcccagcactttttgttttgttgttgttttgagacagagtctcaccctttgcccaggctggagtacagtggcgcaatatcgtctcactgcagcctccacctcccaggttcaagcaattcttgtgcctcagcctccagagtagctggggttacaggcatgtaccaccacacccagctaatttttttatatgtttagtagagatggggttttgctgtttgccaggctggtcttgagctcctggcctcaagtgatccgcctgcgtcagcctcccaaagtgctgggattacaggcctgagccaccacacctggcctgttgtttttgagaaagggtctcactctgttgtccaggccagagtgtgctggtgcaatttcagctcactgcaacctccacctcctgggctcaagcgatcatcccacctcagcctcctgagtagctggcactacaagtgcacaccaccacgcccagctaattttttatagaggcagggtttcgccatgttgcccatgctggtctcgaactctcaggctcaagcattcctcctgccttggcctctcccaaagcactgggattacaggcgtgagcacctagcctgtaatcccagcactttgggaggccgaggctggaggaccacttgaggccaggagttcaagaccaacctgacaacatagtgaagttccatatctacaaaaaataaaaaatttagccaggtgtggtggcacatgcccataatcctagctacctgggaagctggggcaggaggattacttgagcccaggagtttgaggctgcagtgagctatgattgcattgctgcattccagcctggttggcagagtgaaaccctgtctcttaaaaagtcttctgtacttttgcttttaattgtgataaatgtacataccataaaatgtaccatcttaaagtatacagttacattttaaatgtacagttcaatggcattaagtacattcatacattcacattgtacaatcatcgccatctgtctccagaactcttttcatcttacaaaactgaaactctgtacccactaaacaatgactccccaccccctcctccctccagcccctggcaaccaccattctactttctgtctccatgaatttaattactctatacttcatctaagtggaatcatacagtatttagctttctgtgactgccttatttcacttagcgtaaggtcctccaggtttattcatgctgtaacatgggtcagaattccctcccttttttttttttttttttttttttgagacgagtctcactctgtcgtccaggctggagtgcagtggtgtgatctcggctcactgcaagctctgcctcccgagttcacgccattcacctgcctcaacctccagagtagctgggactacaggcacctgccaccatgcccagctaatttttttgtatttttagtagagacgggatttcaccatgttagccaggatggtctcgatctcctttgactttctgatctgtccgactcggcctcccaaagtgctgggattataggcgtgagccaccgccttttaaaggctgaattgtattccattgtatgtatatatcagcaggtgacaacgttatcctgccatctgcttcttagcttggaacatgaagattagtgaagattagactttctacctaaaaagggaaggcaggtggctcacctcaccttctgtgaagaaggggtggccggtcagtgaggaagagtcagggaagggaggaggtgggcaagaaaccaaatatatagacatatgtatgtatatttcatgtatccatccatccatagacactggggtggcttccgtgtcttgcctatggtgaataatgctgctatgaacatgggtatcgcttttttttatttttattttttttgagacggagtctggctcaagtaatccacccgcctcagcctcccaaagtgctgggattacaggcatgagccaccgcgcccagccgggtatcacctttaagggagaattgaaatccatggaggggacattatagggaaggaaagcctggcaaacaacagcaagaagaaccgttaggggtgagagcccttcccagggctcccagggagacagggagcaccccatcacgtgggctggagggccatcttgttggctacttggcagtgggtgtccgcctttgggaagagatgtcccattagatgattcccaagtttcctcccatcctagggtttcagcttgaagagggggctgcggtgcccaccatctgctaactgagccagctcagattgggtcgctagattcaggggagggcactgactcctgttttcttcctcgtctcctggcaaggctcctctgtgggcagacaccagcagatgacaccgatatcctgccatctgcttcctagcatggaacatgtcggcaagcgaagacaggctttccacctaaagcgggaccgcaggtggcccacacttcactttctgtgaagaaggggttgctggtcagtgaggaaggatggggagaagggaggaggtgggcaagaactgaaggctgtgaggatttccccctctttggcatgtgctctgtgtcctgcttgcttgactgaagtgttcatagatgttagtgtccatgccagtgttcagggcctctgtaaagttacacggatgttcctgcaacctcaaagaagtgccacacgtgcccccgagctgggcctgggccaggcagcaaaggcagattgggtggtgggaggaaaccaaagtcccctggttgtgccctccttccctggggcttatgtgttccaggaagattccgggcttatttctgtgcacgcgcacctctgtataaatggaatagtgctttgaatgcactgcaggagtgcctctcaaaggaatcctgtggtgaagtcttttgtaaagtgaaaagtccttttgtaaagcgaataattgtactgtttatctgctttggaggttccgagttttccaagattctcaggggagagagggagttgtttgaaggccacctggcccaccccctctccagtatctgattctcctctggagcatcctttccgagtgatgtgaaacccccgatggttgggaaactcacgaagcctgcaagacggaccattctatctctggagagctctgcttactagaaatggaaacttactctgagctaaaaagtctctctctgaagttttcatccattgcatcttctgcttgcaggttacactgaattgaatgtgccctttccttgtgttgactcatttgatatttgacaacaatgaacttgacccctcagtcccctcttttttgagctaaaagatcctggcttccccattcattcctcatttgcaggattttgagctcttttatcatcctggtggttctgtcttgactttgcttggttggctgtcctgcatcctttgcaaccgtggagctcagcaatgaatgcagctctgagatgttctctgtccacgttgaggagacagggcctctcctcttcctagatctggagtcccttcctcttgttagtccagctcaagaactcttatgacgggagtaaacttgctgttgcctaaaatctcaaagccatgtggtgtgttctgctactaagccacaaccctctcattcaggacttcacggagatccttattttaatgtcaggttttcttaagcaagacacaccggcagaagagtggtctaatctggaactgactgagctctcctttttccctagaactggtcaggcatgaagtgccagttcaagctgctgcggatggctgtggcccttatctgtagtaagtactgatggggcgctggggaaccaaagcctggcaccagggcctgaggttcaaagatggcacagttcctgcccttcacgggcttatggtcaagaaaaaaaaagtgggacatgtcaatggttagcaaaaaagtagggatattgtgagagctgtctgtcctgctgtgctgcttcgtaaccattcatcttttatttatttatctatttttaaaaattatattttcatctttttttttgagacagggtgtctccctgtgtcatccaggctgcagtgcagtggcacaatcatagctcactgcagcatcagactcctgcctgggctccggtgatcctccctcttcagcctcccaaatagctgggactacacatgtgtgggtccatgcctggctgtttaaaatttttggcagagatgggggtcttgccatgttgcccaggctggtgttgaactcctgggctcaagcaatcctcctgccttggcctctcaagttgctgggattacaggtgtgagtcaccacgcctggccttttattttattttattttatattttattttatttttattttattttatttattttattttattttatttttgagatggagcctccccctgtcacccaggctagagtgcagtggtgtgatctcggctcaccacaacctccacctcccgggttcaagtgattctcctgtctcagccccccaagtagctaggattacaggcacgtgccaccacgcccagctacttttttgtattttttgtaaagacggggtttcaccatgttggccaggctggtctcaaactcctgacctcaggtgatctgcccgccttggcctcccaaagtgctgggattacaggcatgagccaccatgcctggccccagcctattttttcatctttttattgacatataatatgcaaacagaaaagtgcttaaggaccagcacccagatcaagacaaataacttcctaacctttttggtcatggaactgatcctttgagatcccttgttgaaagtccaagaccctgtcgccagaaaaatacatatatgtgcactcatgtgcatacacacatatatcaaaagctgcagttttagcaggttcgcaaactgtaactagtccaagaacctctaggaacaagatgtcttcagggccctagttgggagagctcagttctacctacagaggtcattctgagtgttagaggcaagcaggtgtccaccaagtaaacatggtgtaagaggacatttcaggcaaagctgcagcctgaactaacatatagatgggtgaagggtcatggccagcgagttggttagcaaaaccaagaaattcgttttgggattgtgtgtgattttgatcagagataaagttagtgaaatagtatgagtcagattgttaagggctttaaatgctaagaaaagaaaatgtacttcactttgcgttccctgggatcccactggagggctttcaacaagagagttattgatggataaccagagttttagaaaaccagtcaggctgcagtgtggagaatagattgtggggacaagggggataagaccaaagaccaaaggccaaagggctctttctgagattgaaagagatgagtctgaacagaagcaatggaggtaggggtcgggcagtgtggctgacgcctgtaatcccagcactttgggaggccaaggtgggaggatcgcttgagcccaggagtttaagaccagccttggcaatatagcaagaccttgtctctacaaaaaaaaaaaaaatacaaaaaaattagcccggcatggtggcttgcgcctgtagtcctagctacttagactgaggcaggaagatctcttgagcctaggagttcaataccagcctgggcgacagagcaagaccctgtctccacacacacacacacaaaaattaaaaattagccaggcatggtggcttatgcctatagtcctagcccaggagcttgaggcagcagtgagctatgatcatgccactgcacttcagcctgtgtgacagagcgagaccttgccttaaaaaaaaaaaaaagaaaagaaaagaaaaggccaggcgcagtggctcacgcctgtactcccagcactttgagaggccaaagcgagtagatcacctgaggtcaggaattcgagaccagcctgaccaacatgctgaaacaaaaacaaacaaacaaaaaaaccaatgaggatagaagagggagtgaacgcattttctcatccagtcctccaaacccacctagaaagggtattattattagcttaatttataggtagaaactccaggctcagagagttaggttcctagcccaaggtcacccagctaagaagtgatagagccagaattcagagccagcctgtgccatttcaaatgtcccacatgttagccaagctagacagtaagcacctgggctttctctgggtcagctacctgctgtgtaggtaagaggaagactgagtctgaacaaacctgggatggagggtcaggtctgggagggctccacttcaattcacggagggtcaggcctgggaaggctccgcttcaattcacgtccaccttccttacttcttaccccatggctttcaagaaatcaggtctgcccctgaccctctgtgggtctctctggatctgtttcctggatggggctggagaatctctcatcccaggaaggaacttccagccttaaaacctgaggactccttgagtcagggtattagggtgcagtggggtggcagtgggtgtgtcatagcttctgcgtctgcttaggctctgagtttgttcgtttttgaggaaggaaagagaagcacgagtcttgttgtttaaaaaaaaaaaaaatccggccggacgcggtggctcacgcttgtaatcccagcactttgggaggccgaggcggacggatcacgaggtcaggagatagagaccatcctggctaacacggtgaaaccccgtctctactaaaaatacaaaaaattagccgggtgtggtggcacatgcctgtagtcccagctactggggaggctgaggcaggagaatggcgtgaacccgggaggcggagcttgcagtgagccgagatcgcgccactgcactccagcctgggcaatagagcgagattccgtctcaaaaaaaaaaaaaaaaaaaaaaatccaaccgtaagcatcataaaaactaaaatgctgtatcggagttggagaccatcatctttcatacctcctttatcaaaccctggacctggggagccaaggctggaaggctgtcccagggcaggagtgggagtgcggagggcggagggtcagtccctggatgcgccttttctgccatctatcggccatccttggagttgcagggctcagcccagaaggctgggcaaccccaagggaaatgaaggtccctggaggttctggcaccccctgcagtggttagggtggagagaagtgccctggctcattaactggtagctaaataggtataaaattcccctcaaagggctttatttcagtgtcaaatttgccttggtttttctcatctgtaaaatgggaataagaatatctaccctcagtgttcttttggtagtggataatgggatggcagtttcctagcgcccatccccacttgactggctgacccaagaagttcacacaagaagcgtggattggtgatcaggatgaaggcatcttagaatctgttacaggtctgggtgtggtggctcatgcctataatcctagcactgtgggaggctgaggcaggaaactcacttgagcccaggagttcaggcctgagcaacatagtaagacctcatctctacaaaaaaaaaaattttttttttaattacccagatgtggtggtgggtgcctgtagtcccagctacttgggaggctgagatggatcacctgagcccgggaggttgaggctgaagtgagctgtgatggtgccgctgtactcccgcctagagtgagacctgtgtcaacaagaacaacaaaaagaatctgttaaggggtcaattcagcagtttgttggggtcagggttttctttttttgtttgtttttgagacagtcttgctctgtcgccccagctgcagcgcagtagtgcaatctcagctcactgcaacctccacctcctgggttcaagcaattctgcctcagcctcctgagtagctgggattacgggagcccaccaccacacccagctaatgtttgtatttttagtagagactgggtttcaccatgttggccaggctggtctcgaactcctgacctcaggtgatccacccgcctcggcctcccaaagtgctgagattacaggtgtgagccgccgcacccggccaaatgtcacctctttagagaggtcttgcgtgactccccgggctaaagaatttccctccttaaaacaggcattgcttttaatcacctgtttccccccatagatgtctctcttcctgaaattatctcatgtatgtaattgcttactggtttattgctagaccctgtaagctctgggagaacagagatttgcctgcctccttcactactgtgtccccagtgcagagaatggtgcttggcctaatagggaatgaattcatgggtgggtgatgaagtgaaggccctcagcccctgctcagggccctcctgtgacatctctctgcttcctccccttgcagtgagcatggagtttgggcgggccgtgtggctccgcttccacccgtcggcctatcccccgtgccctcacccaagctttgtggcgcacttgggtggcgtggccgtgggcatcaccctgggcgtggtggtcctgaggaactacgagcagaggctccaggaccagtcactgtggtggatttttgtggccatgtacaccgtcttcgtgctgttcgctgtcttctggaacatctttgcctacaccctgctggacttaaagctgccgcctcccccctgagggctggaggcccaaggtcggggaggggagggaaaagcagcacccacagggagcgcctgcgaggtttcttctcatcaccagctcagctaggccgggcagacaaggacagaagactctgggccactgtaatgtttgtgtttagatttggacacacagtggagacccttttctgaaaggcatctggcggaggagttgatgtggctgctgtcgtttttctcggctgctctgatgacatcgggccagggtgaaggtctggggtggggtgtgagagtggccctccctcacctgggctgggcttcttccatggggccagggggtgccccctcactgctgcggattgagcagcagcttcttcctcctcctctaccctcagagaccctaagagacatgggaaggctcgaaggttgttgcgtccaggcatggcccctctctagctcagaaataattgcaggccatgtggtgtctccttgacacctgctgtgtctggggctccagtaagaagagggcctactggacatgtcagctgtgacctggctgaaaccagggtgccctcctgggctggttggtgtgcaccggggcatgatctgttgtgcctgggttgggcagagcagggagcctgtaggctctaggacccctcttgtgctgggggtacccagtgagagggacccatgcagggggaataaacttcattccaagttccaccctggagaagacagacccaggaccagcttcagacttctccctccctttcttccaggatattggcatctcacacgggtgccccagcctccatgcccagccttgttttagggtctttttctttccttttgctgccctgacactactttgtgcctctctttggttatggagacagtgttttgaaacattcatgcgtgtgtgtgtgtgtgtgcgtatatgtgtgtatgtgatgggaaaggtaactgaggcacgacagcgcctgcagagaaggcatggaggatgcagggggcccatgtgggcatccgtgagaggtggcagaccgtggtgtgctgtggttgctgaatgtccttgctttgacaaagcctgcccccttccttcccatctcctgtcccttccacacctgcccctgagcatcactgaccggtggcagaatggccctgctggagggagagctcaagccctccaaggatccctggatgctgaggtttgccaggttcagctcttgtttccgtctgagatggccttcatatccaaaaaggttccatcctatctcccttaggagagaaagagctttgggggcgcaagagaggctggggtaggaatgttgaggccatgtgtccatttaagttagggggacaggaggctacaggaagaggaattccagtttagttggaaaactttgcctcaggagaattgttgggtgcatggatgaacctcagagggagggcagccagtagcctcggaggcttggatgcgggagagaacatggtggttatcaaatccaccccaccccattacacaggtgagaaaacaagatggagggaatgaccctcctaacaggagctggtgcaggccccgaatggagggcatgaggatgacctttgacaaaagatgacactccctttatcgtgctcttggaattctcaaccactgacagcccagaagaacaaagaacgccaggcctgggaggaggcaggggggctgggcgtgtccagaaacaggggcaggagtgtgggaacggtcttcctccagcctggtgcccatcctggcccttgagtgtagcagggtccagggtcagtcaggccaggcatttggggtcttgggccacagtggcttcccatcctggtgactacatgtaaatgggctcactcactcactggcaggcgaggcccagccataccgcatcttggcccactgctaaatagattgccctggcctcatccacatatgtagttccctaggtcctgctcccctgcaccagtgccatgctgagggccgcagcctgtggcactgtgggcccacgcctttggcggtgttgcgtcagcctggggcgtcttgtgtgtgccctgcccaccgttctctgccctagtgatagaaagatgtagatggaagtcagtgcctcagaggaggaggctctgaggctgtggagctgggctcagggaagaccaggggaggatgcagaaggagtcaggacattgctgcctctgcctgggctgcagccgcactaagctgagcgatgaggtcctttcctggagggatggagaatcccctccagattcctgtcctggcccctggggattctgtggtgtgggtggaatgagcagagtgccacctctgtctggtatgacctggagagggggcttcctctcttaggggtgagaaagcattgaactagaagattctagaaatccctcatagaagcactcagctccctcggggactcccagggaagcttgttactgagaaggacagtggaggcggaatcgtgtctcccaccatgttaagtgtgtcctctgctgccaaggaccctcgtctacaccttagaccaccagccccagctgttctctgtcagcacacccacctccatcccctctcccaaccatgacttccaagcggggccacagggtggggtcatagggtcacttcacctgacccaggcctctccccaggtcaggaggcagctgtctggtcagaggggttctctttgtggcatctggctttctcctcagcaggtcccaccaccctctcagcagcacttccccatggccaaggctggccgtgtcctctgtgcctctttccttgtctgaggtggctgccagcccagggggtggtgtgtaaatcttcaggctggtggaggtaggttggccttttatccacaggatacagaaactgaaagctggggaatccccaaacagcagccatagactcactggctctcattaaacgggagaggaatcacagaaactggggaagggaaaacaaaccttcaaaggagaaatttcgctttaatgacaccattcatcattcgttttttaattaggaaaagctccctaatgaggctcttttgccagctaataggactctcgatttccatgagaaccattcttgcccagaggattaggggagctgttgctcaccacaccaggatcttcccccagcgtccaatttaatttgcaaatacgtaatgcagattccctgggtgccgtgaaagcctttcctggcatcattcatgttgctccccgtgctggctggaaagcacggttctcctctgccttaaaaacagtgcccaacagtgaactgcccctccgaggacttgagtaagtggaaaaaacaaaacacagactgcaatgtttgtttctaagtatttttgtattgtgtacattctgtatatttttgttgtaacatattatttgagcacagattccattaaatattttttttctttttccaagccattggttattcaggaagtgacctgaagggctggcattagggcctgtttcatctgggtctgggtcaggatgggtgggagagggtgaacagcagcggtggtggatccaggatttctataaaatacagattggggcatcagtgcttagcaccagtctgtagctgtgtgcatcttacttaacttttctcaaatcactgaactcttttgagtggttgatgaaagctgtgatttctcttcccataaaaatgtgtatgtaggacgggcatggtggctcacgcctgtaatcccagcactttgggaggccgaggcgtgtggatcacctgaggtcaggagttcaagaccagcctggccaacatgatgaaactccgtctatactaaaaatacaaaaaattagctgggtgtggtggcgcacgcctgtaatcccagctactcaggaggctaaggcaagagaatcgcttgaaccatggaggcagaggttgcagtgagccgatattgcaccactgcactccagcgtggtaacagagtgagactccgtctcaaacaaaacaaaacaaaaaaaaccaggccaggcgcattggctcacgcctgtaatcccagcactttgggacgccgaagtgggcggatcatgaggtcaggagttcgagaccagcctggccaacacagttaaatcccgtctctactaaaaatgcaaaaattaactgggcgctgtgatgggcacctgtaatcccagctactcgggaggctgaggcaggagaatcgcttgaaccctggaggcgaaggttgcagtgagccgagatcatgccactaaactccagcctgggcgacagaactagactctgtctcaaaataaaaaaaaaaaaaaaaaaggaaaagaaaagaaaatttaaatgctgcagaatctatccaagaacaaactttagagtgccattaaggctaaaggccaaagaacccacttctgtttacagtgtggagatccaacttccctagaaggagaaatcaggatcctctctgagcatcagtgctcttataggtcaacttcaggctaaagtacctgagccatttaaaggcaagctcctgccaggcgcagtagctcatgcctgtaatcccagcactttgggaggctgaggcaggcagatcacttgaggccagaagttcgagaccagcctggccaacatgaaaaaaccacatctctactaataatacaaaaaaactgccaggcgcagtggctcacgcctgtaatcccaatactttgggaggctgaggcgggcagatcacgaggtcaggagttccagaccagcctgaccaacatggtgaaaccctgtctctactaaaaatacaaaaattagctgggcggtagtggtgcgtgcctgtagtcccagctacttgggaggctgaggcagaattgcttgagcctgggaggcaggggttgcagtgagccaagatcctgccacagcactccagtctgggtgacagagtggaccctgtctcaataaataaataaataaataaataaataaataaataaataaataataaaggcaagctccttggagagccagaagctgttgaattctctgcctttgccttctctccctttttcactttcctggttcttcccttctattaatactagattttcattcttccacacattaataaggcacttcccaataataaggtaattaagaaatgaagggccgggcacagtggctcacacctgtaatcccagcactttgggaggccgaggcaggtggatcacctgaggtcagtagtttgagaccagcctggccaacatggcaaaaccccgtctatactaaaaataaaaaattagccaagcatggtggtgcatgcctgtagtcccagctactcaggaggctgaggcaggagaatcacttgaacccaggaggcagaggttgcagtgagccgagattgcgccattgcactccagcctgggcaacaagagcgaaactccatctcaaaaaagaaacaaacaaacaaaaaaaacaggtgcagtggctcatgcctgtaatcctagcactttgggaggctgaggtgggtggatcacctgaggtcgggtgttcgaaactagcctgaccaacgtggggaaaccctgtctctactagaactacaaaattagccaggagtggtagcacgtgcctgtaattccagctacttgggaggctgaggcaggagaatcgcttgaacctgggaggtggaggttgcagtgagccgaattcgtgccattgcactccagcctgggcaacgagagtgaaactccgtctcaaaagaaaaaaagaaatgaagacgatttcctgtgtacctactatgtgctaggcactgaggtaggcatttccacagctactttatgtgaactaggtataaatatccccctatttatacacaagggaaaaggttagagaaatttagttacttgctggtagtatgtggcacagctggcttcacacccaagactggtggtaccaaagttcatgctgtcagccctcaggtatttgcacaggactgtaagggcactaagcatgtgcaggcctcagggtctttgtttaaagatccatctcattgcattaggcctggggccatccagtaacaggaatgaacctcgggacattcactcagagttcatgtaataggaccttcaccttatcagccctcatagtagtttacaagaaaaaccacagctgtcgattcattactgcttccatatatatgtattttttctcttgttgcccaggctggagtgcaatgatgtgatctcggctcaccgcaacctccacctcccaggttcgagcaattatcctgcctcagcctcccgagtagctgggattacaggcacgtgccaccatgcctggctaattttgtatttttagtagagatggggtttctccatgttggccaggctggtctcgaactcccgacctcaggtgatctgctcgcctcagcctcccaaagtgctgggattacaggcatgagccaccgtgcctggcctatttctttatatttgagagagggtcttgctctgttgcccaggttggagtgtagtggtagtcatagctcagttactttgagctcctgggctcaagcgatcttccagcctcagcctcctgagtagctgggactataggcacataccaccaggtcctgctaattttattttttgtagagatggcatttcactgtgttgccaggctggtcttgaactcttaggctcatgcagtcctcctgccttggcctctcaaagtgctgggattacaggcctgagccaccacatccagccacatttaggaactttagcaattaagagaactggactgccctctcagacctccaagtggaaagacttcattgaagtcagcagggtttccattaagtgagaagacacactgttaggaaagtgtggtcctagtaactgcatcttatttccaagaagcccgcaggctttcctggcacctggtctaagggatcctctggtagaggacaggcattctgtcatggtgaataatgaatgagagtgaaaggaagtaacttgggttattgagttctatgagtataactctactggacaatgaataaaacattgtgagggaaattgctcttagattctgcttgatgcctcctgcaagaagcagaaaggtgtgtatcccagcaagtgatttgatcttcttcaacaaattccttagtatagcaagtataatttcctcacaaccttgttgggaatacaaatgttaggcttgaggactgagctcattaaacaaaaacaactgtcttgatgagaagctaagttttattattataattacaaattaattacagagaaactgaagccattcttcatacatgacaaacatacatttcctctgtgtgtacagcacacaagtaatatacacaaatatattccatgtctgaacaaatcctttttaaaactttaaaagctggctgggcacagtggctcacgcctgtaatcccggcactttgggaggccaaggcgggtggatcacaaggtgagaagatcgagaccatcctggctaacacggtgaaaccccgtctctactaaaaatacaaaaaattagccatgcatggtggcacatgcctgtagtcccagctactggggaggctgaggaaggagaatcacttgaacctgggaggcagaggttgcagtgagccaagattgcaccaccacactccagcctgggtgacagagcgagattctgtcttaaaaaataaaacaaaaacaaaaaaaaaaacaactttaaaagccaagatagtagcttattaaaatttgaatacagtacatgtttctagtcatgaactctgtggtttcttctcatgaccaagatattcagttccatgacaccattttccttgtctacagtagtgatacagagtttgtcagactttttttttttttttgagacggagtctcgctctgtcgcccaggcttgagtgcagtggtgtgatctcgactcactgcaagctccgcctcccgggttcacgccattctcctgcctcagcctcccgagtagctggaactacagacgcctgccaccacgcccggctaattttttgtacttttagtagagacggggtttcaccgtgttagccaggatggtctcgatctcctgacctcatgatctgcccgcctaggcctcccaaagtgctgggattacaggcatgagccaccacacccagcccagacttactttttttaaaataagactaccagaggccgggtgcagtggctcagtttgggaggccaaggtgggaggattgcttgagtccaagagtttaagaccagtctgagcaacatagtgagaccccatttcattaaaaaaaaaaaaagataaaataagactatcatatagagctgtgtaatgtagtgagcctacattacaaaaatatatacaaccacacagagaatatgtaattacaccttgcctatatccataaatgatttgaagcaggtaacacatttgcttttaaatgccatttacaacatagactcttgaatgacatgaatttgaaaatgaagtattttttcagacttaaaacgttgatgtgctaatgtagcttactttaaaaaatgatttccaagtggggaaccaactacattgggaaaagacagtcagattcaaggacagtgtcataaaattgctggttttccttagtcaccctgactttatttttttgagacagagtctcgctctgtcactcaggttggaatgcagtggcgcgatctcggctcaccgcaatctctgcctcccgggttcaagcgattctcctgcctcagcctcccaagtagctgggactacaggcacatgccacagttcccagctaatttttgtaattttagtagagacagggtttcaccatattggtcaggctggtctggaactcctgacctcaggtgatccacctgcctcggcctctcaaagtgctgggattacaggcatgagccatcgtgcccagccactctcactttaatactatgaaaaatgctacttagatttttttctatactgcctacattccaagttattaaagtttaaaaccgtatgaaagcatttatgaagattctgaattgtatttctcattaaaagaaaagaaatgtgagtcatgtcccgaggcttatgtagaggagaaagcagaaggccattgtcagtcattttgaaagttaaaactcagcacttaatgtgaatttagatccatttaagagaggattcctcagttttatgggtttgtgctcctctgagcatcctcagggaagtgagaacacaagacttctgttcttctaagcaaaaatcattatcaaatgaatttattaaagagctatcccgagcaaattgcaattgtatgtatgtagctacataggcttccatgggaattgtaaatggctagctgagggcactttcaattgattcagagtaaaacaatctgaggcttgtaacaaatgtacaaaaaactaaaatcaatgagtaactctaataggaagaaactgtttgcattccttatgttacagtttgcttgtaaactgtatgtactttgtttcttttctcaacactgttttaaaactccagcattttcacctaaaagaaaacacaggctcttcataaatacctgtgaacaaataaatgaaatggtgactgaaggcgatttctgcagtagctttctctcagagataattatttttttttttgagacagagtctcgctctgtcgcccaggctggagtgcagtggcgcgatctcggctcactgcaagctccacctcctgggttcacgccactctcctgcctcagcctccagagtagctgggactacaggcgcccgccaccatgcccggctaattttttgtattttagtagagacgggctttcactgtgttagccaggatggtctcgatctcctgacctcatgatctgcccgcctcagcctcccaaagtgctgggattacaggcttgagccactgcgcccagctcaaagataatattttatcttgaagctagtgcatcgatttgtaaagctcatttaattttctacatactcaggatttgcatattgacttaaaatctgactttatcatccatgccgttatcaactagacaaaaaaatgtatcaagcacccacaggatgcacagatctatctctgaactggtgtagtggtattaatctgttctaagactagaattacatttttttttttaagaagctacagtccactgaaaaggaagtattatggtttttctgagaagaaaagttgctaaatactgcagcaaactcaggcttttcctgagaaaagccacaaacaaaatcatctctgaaattttttaagcaacaacttcctgaagcgtggaatttatggggccagtgagacactaaaatttcacaactctcacatacattatctatctaggactcagtgaagatgttcttcagatttttatttaagttaaattggtaaaatacaaaaagaaaatctggattgagtttcaaatcatcttaaatagcaatcctatgaacaattataactgcaatttcaaacactaagacttaaatatacaacttgatcatacaattatctcaaaacatatgatcaaaaactttggtcaagagcttctttcatgaattcttcaaggacagctatcacatttttggcttcaggcatttcttcatgttccactttaacaatcttcaaaagtatatctccactaccacagttctttaggaacatgtaacatttaaacaaagcataatgattcatttctgcctgtcggataaatctcttcaaattgtttgtgtcttgtatggcctagaaaatgattacccagttaaaaatgtgttaagtgaaataataatgaagctcaaaaaataactcctatccagctgagaactcaacatatcttcctgaattgtttgcttttcatattaaatatttccaaaatttaaattgcagtatgctttgcccttggtagaagaagaaaatctccttttttttcttgtttcgctcttgttgcccaggctgaagcgcaatggcttgatctcggttcaccacaaactctgcctcctgggttcaagtgattctcctgcctcagcctcccaagtacctgggactacaggtgtgtgccaccacaccaggctaattttgtattttcagtagagacggggtttcaccatgttggtcaggctggtctcgaacttctgacctcaagtgatccacccgcctcagcctcccaaagtgttggaattacaggcgtgagccaccacgcgcagccaaaaatctcttatacaaaataaaaatactttaaaataatctacctagcatggtggctcatgtctgtaatcccaacactttgggagccccaggcaaaaggattgcctaagggccggtagtttgagactagcctgggcaacacagcaagaccccgtctctacaaaaaataaaaataattagctgagtgtggtggtgcacacctgtagttccagctactcaggaggctgagacaggaagactgcttgaacccaggaggttaaggctgcagtaagccatgattgcaccactgcactctagcctgagtgacagagtaagattctgtctcttaaaacaaacaaacaaaactaaataaggtgacaacacgtccccatcagaattttttttttttagacagagtctcactctgtcacctaggtcggagtgcagtggcacaatctgggctcactgcaacctctgcctcctgggttcaagcaattttcgtgcctcagccacctgacatagccaggattacaggcatgcgccaccaggcccagctaatttttataattttagtagagaaagggttttgccatgttggccaggctggtcttgaactcctggcctcaagcaatccacctgccatggtctcccaaagtgctgggattacaggggtgagccactgcgcccagcccccatcagaattttgaaaacttagccactgaaccagtttttttgtgctttccaactaagttaagtcacaaattgtaagactgatgttccttaaatataagcaagcattcaacccaatttattagaaatgatatgtatacagaagctgccaaaaaataaagtaaatgtcttctgataattccagttttgagaacatcctaattaacagacatcacagctataaagcaatttgttactctgtcactggtactaattaaaattcagacaaaaatttcatgtggcacttggcacacagccaactaattacctttagtttaaagttctccagtacttgtcggaaaagaaaagggttacctcctttggcaccatttaaaaaagcttgcatccaatcctcacaaaaccggttacttcctataaaacatttcagagagactaaataaaatgaaattttacaaagctttatttatttatttatttgagacgggagattcgctcttgttgcccggctggagtgcagccggagtactaactatatcgttagtagagatggggtttcaccatattggccaggctggtctcaaactcctgacctcagatgatccacctgcctcagcctcccaaagtgctgggattacatgtgtgagccactgcgcctgacccatttatttctttataaaaacacctataatgaattatttaagacatgtataatggcctaaaaaaacagtgtgctcaccacatggctaaggaataccaaaatggctgaagccccctgtatgccccttcccaatcacatcccccttcctttcccatcagagaggataatcattcccacagacgtctttaaacttttcccatatacctttgcacgtgtaagccttatctacattattctgcatatgttaaaacttttatgtattttttcttttatggctatttcactaaatagtatgtttgagagctatattgacacaagtagctctagttcattctttttcactgctctgttatattccattgcatgaatatagcagcttatcagttttcttgttgataaacacttaaattgcttccaattccttgctttttcaagtaatgcctttatggacattttaaaattcatctccttgtgtacacatactagaatttctttatgtacctaggtgtggaattgctaggcatggcatgatttccatgtttctagaattatattgttttcaccaagtggtttctcatggtttgagataaccatgtaaaactgcacaaggcaggaagaataaggttgtatcataggctctcagtgcaaagatggggactcgcaagagatgtaggaaggctgcttcagaggttgtagctcacctgcattgcagaactgaggctgggagctgctgcaatcgatgaccacagacttatgctgctcctctgtcatggccatgcacaaagaagtcatggtgccttcatgaataagtccttgaagactggccacactcagaaacctgccacacacacaagtccatttccacaaacaatattgcaggacggaaggatgaaaacaaatttattttgcactgggctggtggggaagggatggaaggagcagtttacaaacacagatgtcaatcttgctgtggaaaagcttttctctttgaaaaaactgttctttacctgttaatgtctctctttgttttttcatctgattctttaacttcaacaggagtgtaactcaaagcctatgagagaaaaataaagcctgattggtacatatattccagtttttcttgagcagctactcatgactaaatgtccccataagtccctaccacactggacaacaattgatgggcactggtcacaagctctccagagccttgttcagccactgctcattaacattttatagaatcaaaattgctctggatttttgttttccttttcaaattgttttggaaactatacctttcccagatcacttggaaaagtaattattttaaaatgttttatcctattaggaagactcagcatttgaaattcaactctaccttagtaatatcactttctagatctgagaaaataaagtgtggtctatcttgatagcaagcatagtttgaatatttggggagggatgggagtcatgttcagagaaaatgagtatgtttctaaatcatccaaagtgattctcagttaaggaaatgctctcatttggcagtacttacagcatgtagcagaaaggtaagcttttcctgaaagagaagaacaaccctttggattgggcatacaacatcctcaaaccagctgctcagataggattttatgtgactctccaggccccttgcctaaatcaagaaagaacatcatttgctttaatataagcctttcctttagtggacttcatattttcttcatcatatccttgatggtgaaaaagaccaggatagacacctccctttttaaagctaacaccaccaattcaaaaaaagaaattgtgatatacctttcctggcttgttgggcagggtgagggttaaatctgtactgaatttatttaaaacacaccaagaaatgcattctataaaatgaagagactgaatagggttccatgctatttcttcacagggaagagttgggcactcacaagtccctctcctcccactgtactgtgcactcaatggagatactcactcaataatcctcatttccctggcacctgtggtacagtgtctaaaacatgcatagtatgagcttattaagtgccttttgaattagtcatgtagatagagaattcattcgtattcagaatgtgaatggggaaggatacaagtaactcatcaaagcactccactccactccagatgtcagacatgctaccgtgagcacatctggctttctaggctatactgctccctgaagactagtgtcacacacgaagagctctagtccgggagaacaactctattagacttgcatcagttgctcactcctgcactatcccttcctctctcctgcagtatcttctaagtatgtgaaaagtataacttctactatatatgtaatgggtagtaaatttgtgagagtcatgactaacaactgctacaagctgaaagcattgtttttgtttgcttttttgagacagggtctcactctgtcatccaggctggagtgcagtggtgcaatcatagctcactgcagcctcaacttcccaggctcaagcgatcctcccacctcagcctcccaagtagctgggactacaggtgcgtgccaccatgcctggctaatttttgtatttgttgtagagatggggtttcactttgttgcccaggctggccttgaactcctgggctcaagtgatctgcccgctttggcctctcaaagtgctgagattacaggtgtgagccaccacacccagccagtttttcaaaggtttgaataagttgatatggatatgcctaattcataaaagatcaattaatgaaaatagaatgtttttaagaatctttgatgtttagttcaagaacagccatactattgcatagcatgtctttggtgccagaggctgcatggaccagtacttctgaccataatataaatcttatatgcctagaaatcaggaaaaggacatcctcttcctcgccaggcatgttactacatgccattgaatagatcgaatttttcatagatacaaaacatcagacgtagtcttgtgaaactttcagcacttacaggactatgtttcctgtatccctttaagatcacctgtaggctgggtgcagtggttcatacctgtaatcccagcactttgggaggccgaggcaggtggattacttgagctcagcagttcaagagttcaagacaagcctgggcaatatggcaaaaccccacctctaccaaaaatacaattagctgggcatggtggtgcatgcctgtggtaccagctacttgggaggctgaggtgggaggatcgctggagcccagaaaaggctgcagtaagccatgatcgtgccactgcactccagcctgggtgatagagtgagaccctatctcaaaaaatgaaaaagaaaaagaaaccacctgtaggctgggcacaatggctcgtgtctgtaatctcagcactttgggtggctgaggagggaggattgcttgaggccaggaatcctagaccagcctgggcaacaaagtgagatccccatctcgacaaaaaataccaaaagttagccaggcgtgttggtatttgcctgtagtcccagctgtttaggaggctgaggcgagaagactgcttgagccccaagaagctgaggctgcagtgagcctgatcgcgccactgccctgcagcctgggcaacaaagcaagaccctgtctaaaaaaaaaaaaaattcacctctctactagctcacaaggtggcaagtttctagaatacaggcgtctttgtgtctacctatatgatttgacaagtagagcaatcacagtatattaatcatttcagtcattattttatttttttaactctgtcgctcaggctggagtgcagtggtgcaatctcggctcactgaaacctctgcctcccgggttcaagcgattctcctgcctcagcctcccaagtagctgggactacaggtgcctgccaccatgcctggctaagttttagtagagatgaagtttcatcatattgaccaggctggtctctgaccttgtgatctgcccacctcggcctcccaaagtgctgggattacaggcgtgagccactgagcctggccccatttcagtctttaaaaaccattaagtcagtcaccttacctcacaattcatgttatttttcagcccttgaatgtacttgtccaattcaagcctgaaagtatgttcttaaggaagcaataaaggatgaataatgaagacagtatttcatctctcaacaagaaatataaaatctctcaaataatgtgagctgcaaatgcaaacaagccaaggcaaaatggccacatgaaggtatgaaattcaactaaatacacgaggagtagaaaagctttttggaggttggtagtaatattcttccacctgccttcccatgttttccttcctgatgttctcaaaaaccaaagaaaggatatagctcaagtcctttttcagaccctcctaaaaaacagaccacatattctgaagggttacgttcagagtctatcgttactgtttcaggaagcagtttttcattttggaaaaggcagtaataacaaccaactcggtaacctggaattctagaaaagaaagaaaatgtaaaatgcattattttggttactcatgcatctataattttgtggactgctctgaattctggtcatcttgatctggcaacaccattaaactgcccactaactcagagcttcccagacttctcgttggtgtacttgcagcagcaaagaaaaatgaatgtataccctggagggctttagttaaagcagccactaacatacatgaaatttctttgaattctcctgtcttatgtgaaaaattcacacaaatttcactctagttcatacccatgtttatattaaaaaaaagtatgttctcccctctcccaaagcttcacaaattgatgtttaaggcagatgtgcctgaaggtggccttatccttgggaagtggcctcaaactcctgaggacctgtatgctaacttcacggtctgagttgaactagaataaagaggtgtaatggaggccgggcacagtggctcacacctgtaatcccagcactttgggaggccaaggcgggtgaatcacctgaggtcaggagttcgagaccagcctggccaacatggtgaaaccccatctctactaaaaatacaaaaattagccgggtatggtggtgcatgcctgtaatcccagctattcgggaggctgaggcaggagaattgcttgaaccagggaggcggaggttgcagtaagccaagatcatgctactgtactccagtctgggcaacagagtgagactctgtcttaaaaaaaacaaaacaaaacaaaaaaggagaggtgtaatggaaagacagttggaattggactaagaatgctcatgtttaagcctgaactccatcaatttgaccagcctcatgacttaagtttacataaactctgagtttatttcctcatctgaaaatgaaaataagagagtatctgctatatttcccctttgtaaggaaaactacataaaagtttgtgaaaatacaaactgtatacaaatttagttttaataatcaacacttttcttcttctaagtacaaaacttattagcctgggcaacatggtaggaccccatttctaaaaaaaaaaaaaaaaaaaaattaaaaaaattgctgggcatcgtagtgcctgcctgcagtcccagctacttgggaggctgaggtgagaggattgattaagcccaggaggtcaaggctgcagtgagctgtaatcgggccgctgcactccagcctgggcaacaaagcaagaccctgtctcaaaaaaaaataaactaattaaataaagtgcaattgggtgccagggtctctgccattcaattaattccattccacaaatgtttatgtgtgaggcccagtgctcgggctgccagagaataaagacaaattctgcaggtctagtaggagctgatcttttggagtttctcatcacttctcatatttagttcagaaataaaaactcaggacacagcacattttgcacttactttagctccacagatgcaacattacccagcccttcaaagactgcacctcttgaaagacgcttagcaatgaaactgcgcagctctggctccacttcggatggtagattagtatctgccaaggagaggcttgacaaatgaaagacacacattctttaccagtggactagggtattcacacccattaagtcagacagaatggtaccaacgccaggggctcttttaaggactggggaaagctgtccttatgacccctattggtgaggcttctaggaatgtatgtcactaagtatgatctacctcatcaaatagcttaaaatattcctatctttccagctcattctctccagtactgtgactccactggaacccccaatccactgaccctacctctttttcagtctctcaagtttctcatctcacttccctccttattctgccttaattccatggtcagtcattataatcacacccctgcacacattcttatcttttttatctttcaactttattgaggtataattgatgatttaaaaatttcagggctggggccgggagcagtggctcacgcctgtaatctcagcactttgggaggccgaggcaggtggaccacaaggtcaagagatagagatcatcctggctaacacagtgaaaccccgtctctactaaaaaaaaatacaaaaaaattagccgggcgtggtggtgggtgcctgtagtcctagctactcgggaggctgaggcaggagaatggcgtgaacccgggaggcagagcttgcagtgagctgagatcgcaccactgcactccagactgggcaacagagggagactctgtctcaaaaaaaaaaaaaaatttttcagggctgggcaaggtggctcatgcctgtaatcccaacactttgcgaggcagaagtgggcggatcacttgagtccaggagttcaagaccagcctgggcaacatggtgaaaccccatctctaccagaaatacaaaaattagccaggcgtggtggtcagtagtcccagctactggggaggctgaggtgagaggatcacctgaggccggggaggttgacgctgcagcgagccaaagtcatgccactgcactccagcctgggcagcagagcaagaccctgtctcaatttaaaaggaaaaagaaaaaaaaaggatttctttttggctaatcaccaagcacactatcagtatgtggatttgtttgccccagccttgaatgaaccagccaatgaggaaatcaggatgaggttcctaggggataggaggaattgacggtttgactcagggaaagctcagtggaaatagagtatccactgacatgtacaggccagagatgcagggaagatgaaagcacatgcatgaattatgctgaagctctttttacctgaaatcatcaccagagggagtttctgcatttgtgccacttgggcttccgtcctcactgtcccctcgttgctgtgccaatctacaagccacaaaaccaatagtgctatcaattatgggctctaaaccaagaggagtatgggggcctggcaagcagggtaaggcaaggagtcaactaaaaatgctgcaaggtggaagtgcactgcctatcctcatgacaaggaaaacccatacagcagtgctgacaagagccccttctctctccaggccacttaacgggtggaggaaaggctaaatacccagaaggttcaaggaaactcctttaaaaaccaaacttgacaaggccaagaaggttccaggaaagtcagaaggaggaaaaagaggaatcaagaacagaggaaaaccagagggtggggatgggggtgtgtgtgacagaaatgggagaagtggggagataatgacagaaaggagaggggacgggaactgaaattattgagcatgcggggcactgcgctaaacaaagggcagccgcgagagtaagaggctgggatgatataggggcagatgaagggcacaggcatggttgggccaggcatacaagtccacgacgggggccaggaagagcagcgggaggcgaggagcgcccttcaggccagagaccttggctgggagaggagaagatggcttttaggagcggccgggccgctgggccgggggtggggtgcaaggccgggcggcgggccgggggcggggccgcaggggcgggcgggctggcaggccgagctgggcgccagcacctgcttccgcgatagctgtaaagacagtagtggctgctggacggcggctcgagtctccgctcctcggctgagcctccctcttcgctgctctctagttccttttcatctccatccatcgactcctgcaaagaggggagcattgcggcggcctctgagcggccctgtgtctccgccaaaccgctcccctgctcccgtgcagccgtcggtatcagggctcgtccggctcccggccctcgcacacctgcgttccgctggtttccccgggttcgcaggcaaggactggcctggaaagggagtctcttctccccacaggggctgacaggcgtactgagttcgcctttactgacaagcttttaccatttattttgaacttattttcctttgagacatctgggaaactttctatgtgataaaggtggcacaactacctagccacatggaaaagaataaggctactcgtctgcctccttgcgcgcgtgccagcacgcacagacacccgtttgatcaaaaagttaagaatttaaaatgaattttgttaaagtgaaaatatgggataattttgttaattcttgaagagggtctttccaaacataacaaaacacttagaagtcatacaggaaaacgtttaaaaaaatgactacgtaaaaactaaaaggccgggcacggtggctcacgcctgtaattccagtgctttgggagaccgacgcaggcggatcacttgaggtcagaagttcaagaccagcctgggcaacatggtgaaactgtgtctctactaaaagtacaaaaaaattagccacgtgtggtggttcacgcctgtaatgccagctacccttccagtctctgcccattacccagttctaacaccaattcacattttcaggtgtttgtttctgcaacaccccattctctggtaccagttttctgtctcagtccattttatgatgctataaaaggataccaaagactgggcaatttataattagctcttaaaggccccacttcttaatagtcttacaatggcaattacatttcaacatgaatttgggagtggacaaacactcaaaccatagcgccacgtgaaggaggaggcagactggagtgatgtatctacaaaccaaggaatgtcaaggattgatggtcatcaccagaagctaggagaggacatggaacagattctcccctagaggcttcaagagagtatgtccccaccagcacctccatgtcaacttccagcctccagaactgtgaaataatacatttccattgttttaagccaccgtgtgtgtgtgcatgcgtgtgttttgtgttttttttttttatttttagtagtgcaaactttattcataaataaaacttcataaagttaaaagcaggggcagttcctatttttaaaaaggaatagtggaaggcaacctgccatttcatttaaaattacaagttaggtttttcagatggataacagttgagatcgttaaatccccttcctgcttctcagattttcacaaaatagcacattaaatcctcagtcctaagcaattatggcagagattccaaattgcctctccatatcaaagtggatagcacagtttcttctcttgcaataaaggtactcatttgatgaacaagtgagtatagcagtcagattcttaaaagattgtattgcagaagttactgccatgtcttcattcgcaatgggtatcctcacctctatctcccattcagtaacattgtcagtttccttatctctcatttcaactacatttaaaagaggattctgattgcggacaacacatgacagaggcatttcagatcggcagtagtctcttgagatatacttgattttagttttaagcagaagaacttcctggagaggttgagttaccacagtcatgaggatggtagaaaaactcatagtagatatttggcaaaactaggttacaaggcagccatctcctagaaacacttcatcggggttcatatacaaattgtgaaatatcgtgggtttaatcctggcacagaaccaaaactgggtgcattgtacttgaatagccgaccagtccccagcacaggtccatatcaaggaattgagaaaaaagagcccatttaaccgcaaaatggtcttcatttgcccagactgaaagccaaatctcactcaggaaacagctgtatttttattttttatagagacagtgtatcactttgttgctcaggctggtcttgaactcctgggctcaagtgatccttctgccccatcctcccgaagtgctgacattacaggtgtgagccaccatgcccaggtggtacgtgttatagcagccataagaaactaatacagtggctgggtgtggtggctcacgcctgtaatcccagcactttgggaggccgaggcaggcggatcacaaggtcaggagatcgagaccatcctggctaatacggtgaaaccccatctctactaaaaatacaaaaaattagcccagtgaggtggtgggcacctgtagtcccagctagttgggaggctgaggcaggagaatggcatgaacctgggaggcagagtgcactccagcctgggccatagagccagactctgtctcaaaaaaaaaaaaaaaaagaaagaaagaaactaatacggccgggcgtggtgactcacacctgtaatcccagcactttgggaggccgaggtgggtggatcactaggtcaggagtttgaagccagcctggccaatatggtgaaatcccatctctactgaaaatacaaaagttagcctggcatggtggcacacacctgtagtcacagctactcaggaggctgaggcagaagactcacttgaacccgggaggcagaggttgcagtgagccgaaatcatgccactgcactccagcctgggtgacagagtgagactctgtctcaaaaaaaaataaataaaaataaaaaaagaaagaaaggaagtaatagagtcccccccaacaaccctttcttctattcttatctggatttcttcacattcttccctgttaatcccattttttctagattatggtttattctcttgatttgctcaagtactgcctccaatattagccaagaaagggtatatataaaataatttttaagctcttgcatgtctgaaaatatatcctcacgtctttattgtattttcacatttgattggatattccttagaaatagaattttaggggccaggcatggtggcacacacctgtaatcccagcactttgggaggctgaggcaggcggatcacaaggtcaggagttcgagaccagcctggccaacatggtgaaaccccgtctctattaaaaacacaaaaattagccaggcctggtggtgcacgcctgtgatcccagctactcagaaggctgaggcagaagaatcacttgaacctgggaggcagaggttgcagtgagccaagatcatgccactgctctccagcctgggcaacagagtaagactccatctcaggggggaaaaaagaaatagaattttagattgatatgattggacatcgaattctaggttgaaaagaattcccctggccgggcgcggtggctcacacctgtaatcccagcactttggaaggctgaggcaggcagatcacaaggtcaggagattgagaccaccctggccaacatggtgaaaccctgtctctactaaaaatataagaattaggcgggcgtggtggcgcatgcctgtagtcccagctactcgggagtctgaggcagcagaatccccatgttcgtcaggctggtcttgaactcctgacctcgtgatctgccctcttcggcttcccaaagtgctgggattacaggcatgagccaccgtgcctggtccgaatcaaccatttctccaaggacctcaggttgcttttactggagaatggtattacaaaccaagatctctggacaaagtatgcttgatatgggacattattgcttctaggccctctcagctgatatatgtatctatactaactttagtatatacacatatccataaatatttctctatgtatctattttaaaataaacacgagttcattctggtgtctccagctctaatccatggccgcatggatcattctagcctcctccccttgcttatctataaactcactacaacgagaggcacagcatggtggctcacgcttgttaatcttaacacttagaagctaaggcaggaggatcacttgagcccaggagttcaagaccagcctggacaacaaagcgagaccttacctctacaaaaaacacaaaaattagcaaggcatggtggcatggccctgtagtccctgctactccgtgggctgaggtgggaggatccattgagcccaggagatcaaggctgcagtgtgctacgattgcaccactgcacactaccagcctgggccaccgaaacccagctaatttttaattttttcatagagacaggatattgctttgttgcccaggctcgccttaaacttctggcttcaagtgattctcccacctcagcctcccaaggtactgggattacaggaatgggctagcgcaccaggccttctttaatttctaacagcaatttttttttgtttttttttgagacgcagtctcgctctgttgccaggctggagtgcagtggcacgatctcggctcactgcaacctctgcctcccaggttcaagcgattctcctgcctcagcctcccgagtagctggaactacaggcacacgccactaggcccagctaatttttgtatttttagcagagacagggtttcaccatgttggccaggatggtctcaatctcttgacctcaggtgatccgcctgcctaagcctcccaactaacagcaatattttattgcttattgctttcatagtaaaagtgttttaatctgtttatggtgctgtaacaaacaccacagactggggaatttatgaataacagaattgtatttctttctttctttttttttttggagctggagtctcactctgacaccaaggctggagtacagtggcacaatctcagctcactgcaacctccacctgccaggttcaagcctcagcctgggttctactgtctcagcctcctgagtagctgggatgacaggcacccaccacaatgcccagctaatttttgtattttcagtagagacaggattttgccatgttggcaaggctggtctcgaactcttgatctcaggtgatcaacccacatcggcctcccaaagtgctgggattacaggcatgagccaccacacctggccagaattttatttcttttctttcttttttttcccccgagatggagtttcactcttattgcacaggctggagtgcaatggcgcaatctcggctcactacaacctccgcctcctgggttcaagtgattctcctgcctcagcctccagagtagctgggattacaggcgcccgccaccacactcagctattttttttgtattttttagtagagacagggtttcatcatgttggccaggctggtctcgaactcctgacctcaggtgatccacctacctcagcctcccaaagtgttgggattacaggggtgagccaccaccacacccactgaattatattttcttatagtctggaaatttggaaatccaagatcaaggcactaatactcagtgtctgatgagggcattcttgctgcatcctcatttggttgaggcaagagagagtagagtttagttccttccagcactttaataaaatcactaatccccccccacccagtttactcatgatttaatcacctgctaaaggtcccaactcttaatgctatcacattggtgattacgtttcaagcagttggggggatattcagcacattgcaatacggttttaaactttttcatttttcaatttattttttcatagagatggtctcactatggtgcccaggttggtctcacactcctggcctcaagccaccctcttgcctcagtctcccaaagcacggcaattacaggcttgagcaactgcacccagcctgaactttttttttttttttctttttgagacagagtcttgctctgtcgcccggactggagtgcagcagagtgatctcggctcactgcagcctccgcctcccgggttcaagcgattctcctgcctcagcctccggagtagctgggattacaggcgtgccccaccacgcctggctaatttttttttggtatttttagtaaagaccgggtttcaccatgttggccaggctggtcttcaactcctgatctcaggtgatccacccgcctcagcctcccacagtgctgggattacaggtgtgagccactgcgcacagcccaaactgatcctttaaaattcaaatttaattcagctccacacatactttgtgttttggggcaaattattccagctctcttaagtctcttttatctcatctctattaacaagttgacaataatggctcctaccccagaggctgagacaaataatgttaaaactcactacaatgcttggcacacggtaggtgctccatggatgtctgctattattttttgcttttaatagtaacataatttacattactagttattattatatgctaagctctgttttaagtgcagccaagatgaagtttaactgccttgcccaaagtcaggcagctaagcagtggcactggtggactatgaacccaagcactggacttttaaccacctctcacttgcatgatcctccagttgccctcttagaaccactgtgccttctcagagacttcagctgaaatccaacttctgagaatgcttctagggttcgccagaacccgcctttgctagcctccctaggattatctcttgtgaccagcaccttcactgacagctccagtcttttttttttttttttgagacggagtctcactctgtcacccaggctggaatgcaatggcgagatctcggctcactgcaaccttcacctcccaggtccaagtgattctcctgcctcattctcccgagtagctgaggttacaggcgcctgccactacgcctggctaatttttgtatttttagtagagacagggtttcaccatgtcggccaggctggtctcgaactcctgacctcaagtgatccgcctgcctcggccttggcccatagtgttgggattactggcgtgagcaaccgcgcccggctatcagctccagtcttaccacgattagtttttcacgtgcccagcctcaaagacttaaactctttgctcccttacggagataccctttccttcaccttgcttgctcccgttgactcctcaagaaacctttcttatgtcgggcgcagcggctcaagcctgcaatccagcactttgggaggccgaggcgggcggatcacttgagcccaggagttcgagaccagcctcgctaacatggtgaaaccccattctactaaaaatacaaaaattagccgggcttggtggcgcgggcctgcagtcccagctactcgggaggctgaggtaggagaatcgcttgaacccgggagacggaggttgcagtgagcagagatcgcgccgctgcactccagcctgggagacagagcgagacttggtctcagaaaaataaaacaaaacaaagaaaaacaaaactttacttgacaacccaacgaccactaccactacagccgccctaggactcccgctctctgaggtcctacagcacttcgcatttccctcaacgccgcactgagaactctgcattgtgtactcgtctgtcaccaatctgcgagttacaaagcagagactaacttatttggtttagcatttaataggcacataatcaacatttactgttcaattgaaacaaaattaaaattgggcgctgtctctatctttatttgtgatcggccctaactgcactggcaatcttttccgtttttttgttttctgttttccattcgcatgccccttagcgtacctggggctccggctcctttacaaatgaaacccaaagtgctccgcaagcacagccagcgaaagcgaaaaactctgaaacggacaagatggctgccacctcttcgcgcctcttagtcccacccactcagggcggaggtctgcgtcatgtgaccctccccttcttggctccgcctcctaccgcagtgcttgacgggaggcggagcggggaacgaggccgtcggccattttgtgtctgcttcctgtgggacgtggtggtagccgttgggttgggaaagtgagggatttttggcctcgtttctcctgcttcttttctcctcccttttactttgccggtagaacacagttatgggtcgcaagaagaagaagcagctgaagccgtggtgctggtatcctttgtcggtttgaagtcgaggtcgcgttggggtgccggttgttggggcctgggactaggaggcctggatttggcttacggcgtggagcgtttgtatttaggcgtctgcgtgggtggcctggtggctgggattggacttgggaaggcttctaggaaaatggggttccgaggtcgacaggcttttgcagttgtgggtcgtgtgactctgtgactcaggaggatcttgttcggtgcgaattttggactccgggaggcggcctggacccctccgccagggacagtgtcccctagggactattcagccaccttccgttgttttggtgacgattcaacaagggacttttcttcgagtgcgataggcttattactttcatggagggttggggacagcttcacagtctgtcacccactttttctgtttttatttactttatgtgtgttttgtgtttattttttcgaattggcggtttagtaaagaaccaagttagtcaaccctggtttcgaacctttttttttttttttttcttttcggggcgggaggagaactagcttccgtgtctcacccagaggcgccttaatcttcaggaagcgttctcacagggcggagtttctgttacccaactttgtaggactaaaaagtgcctatcttattaggaaaactcttactacagtgtggtattaatgctttttctggaagcgttaatattctttacattaaaattgattttatttactgttttgtacgtaaaggcggcttgttacagtactgcgtttatgtaacagttttaaaaatagcttaaatacggttacgaattttgtaatgtgattttaggaaaatctgagtagtgaggtaagaattctgttttattgatgtaagaattctgctttattgattttattgatctgtgaatttaaatacattgcttggcaacataaattcatacggaattggaaacaactttatggattgttcattcgaaattatgtgattattgttcaccatatagttactcttagattctaaatattgctaaattcctaatccagttattgctatcgtcttcatatctagtgaagtaattgtcttgacagaaccttagggatttcttaactgaactctttcctgtcctcagtgtgcatttgtaaatgttgaaatatttataacaaaagtttcaccgacatctctgttaaacacaggaatttgacaaagtatattgctgattattgagatgtgttttttggggtggtgaagagagctggccttctaggaaattgaaaatactgaaataacatggcaagtgtagtccctaattgtgtaataaatataaaaagcagagtttctatacagtaccattttggttttagctgttcccatattgtaatgttatccatatgtttttattataggcagtgtcatcattaggctgtctttgtgccttaacagtattgatcaggtattgtaatagagattttgatgatgagaagatccttattcagcaccaaaaagcaaagcattttaaatgccatatatgtcacaagaaattgtatacaggacctggcttagctattcattgcatgcaggtaaggatttttcttctgtatttattgtccgcttgtgatttggaaacaacttgaaagaataatcttttttatttttttgagtttcggtcttgtcgcccaagctggagtgcagtggtgcaatctcggcccactgcaacctctgcctctcgggttcaagctattcttctgcctcagcctccggagtagttgggactacaggcagccgccaccatgcccggctaattttttgtatttttagtagagactggggtttcaccatgttggccaggctggtctcgaactcctgacctcaggtgatccacccacctgggcctcccagagtgctgggattacaggcgtgagccaccgcgcctggccgaaagaataatcatttatttctctgacaactgtagttttgttttttttttgttcacttacttactgcaaaagataagatagccaatcagcattaaaaaaaacaaaaaatttgttcgatagccatcaagacaataaacaaaactggctttttatgtttaaagagggtttgtatttgtatttagtttgatagtaccttactaggttagattggtaacatatcgaaatcactaaatatttcctgagtacttggagcagagaacaaggatcagcgatttagattttgtaggtggtctggccttaagaattaatacttaattagcagtcattactcactgccattgaaggatctgttattatctgtagcttggggctaggctaatttcagcaatttatttattggacttcttttggaatggcagcattgtactttttgcttttgtttttaagagatggccttgctctgtggcccaggctggattgcagtgacatggttatggctcactgcagcctcatattcctgggttctagccgtcttcctgcctcgttctcccaaagccctgggattatgggcatgagccattgtgccagcccagaattgtatttcatttaataatttctaggtttcggctgggcgcggtggctcacgcctgtaatcccagcgctttgggaggccaaggtgggcggatcacaaggtcaggagttcaagacagcctgaccaacatggtgaaaccccatctctactaaagatacaaaaattagccgggtgtggtggcatgggcctgtaatcctggctactggggaggctgaggcaagagaatcatttgaaccctggaggcagaggttgcagtgagctgagatggtgccactgcattccagcctgggcaacagggtgagactctgtctcaataataataataatgacaataatttctaggtttttaaagttcttttaataaatagcgagagcattgtaatttatattttttaagatctagtaagtaccttcatgtctcattcaacattattctactttgcttagtcctagagctgtctgaatttttgctaaattagaccttacagaaatatgagatgagcaaataccaaatcattggaaactactatgggtgggaggtagggagacgtgatttctccaggtttaaagataaatttatatagatccttttcactccagatactttaacaataatttaatattcattttaaaatgttgaccagatgtggtggctcacgcctgtaatcccagcactttgggaggccgaggctggtggatcacctgaggtcagggtttcaagaccagcctgaccaacgtggtgaaaccccatctctacaaataccaaaaattagctgggcatggtggcaggcacatgtagtcctggctacgggggcggggggagggctgggggcggggggcgcgaggcgggtgctgagacaggagaatcacttgaacccgggaggcagagtttgcggtgagctgagtttgtgccactgcactccagcctgggtgacagagactctgtctccaaaaaaaaaaaaaaaaaaaaaaaaattgttagagaacctactacatgttagactcacagctgttcactgttgcagccattagttacatgtggctatttaaaatgatataaatatctaaatgctcagtttctctgtcaagtagctaacttatattgggtagtgtggataagaacattttgttttgattgattgacagggtctcattctgttgtccaggctggagtgcagatcatagctcaccgcaactttgaactcccttactcaaatgatccttccaccttagcctcctgagtacctgggacaacaattgtgtaccaccatacctggctatttttaaaattttatttttgtagagacagggtctcactatgttgcacaggctggtcgcccaactcccaggatcaatcgattctcccactcggcctcccaaagtgctggaattacagttgtgagccactgagcccggccattttctttaattctgaatgaaataggggtttaaatagagatgtatgctctgtcagttttttttttgttttattttgaaacggagttttgctctgtcttgtgctcactgcagcctccgcctcctgggcttaagtgattcttgtgcatcagccttccaaatagctaggattacaggcatgcaccaccgtgcctgcctgagttgtatttttagtagagatggggcttcaccacgttggccagggtggtcttgaactcctggcctcaagtgatcccatctactttggcctcccaaagtgctgggattacaggcataagtcactgcagctggcctctattagacttttttttttttcttgagacggagtctctttcgtccaggctggagtgcagtgggcgtgatctcggctcaccgcagcctctgccctccgggttcaagcaattctcctgcctcagcctctcgagtagctgggattacagacgcctgccattgtgcctagctaattgttttgtatttttagtacagatggggtttcaccatcttggccaggctggtcttgaactcctgacctcctgatccaccttccttggcctcccaaagtgctgggattacaggcgtgagccactgcgcccagcctgtaagactttttaaaaggatttttctggctgcagggttgaaagtaaagtgcagagtacggtgagaccactttagaagacttagaatattccagacaagaggagatggtgacagagaccagagtttgataggttagatatggggtataagaaaaagtgaggagttaagggtggtctcaagatgttgatctcaagatggtctggctaggtgcggtggctcacgcctgtaatcagcactttggtaggccgagatggactaatcacttgatcctaatagttcgagactagcctgggcaatataatgagaccctgtctctacaaaaaatgcaaagttgggcatggtggcacgtgcctgtgtcccagctactcaggaggctgaggcaggaggatcgcttgagctggggaggacgagactgcagtgagccgtgatagcactactcagctccaacttgggctacaagagtgaaaccctgtctcaaaaatgtttattttgagcatatgacgagatgtgaaaagctacagggataataggcttaagaatgagaataagggagtcctgtgttaattttgagtgtaggtatgtttgaggtctattaaatatccagatgaaaaggttaccgaagcagtttgatgtacaagtcaggagttcatagaaattaaaacaggagatagaaatttggacgcatacaatgtaagggtggctagtttaagccgcgctaccagatgtcctttgtaaggactgtagtgtggttggaaattaggtgctctctgctctaggccacttccaacatttgaaggtcaggagattaaaaggaatcgtctaaggagatgaaaggtaggaaaaccaagagtagtgccctggaagtcaatgacgtgtttcaaggagtgagttatttaactgagtcaaatgctggttcagtaagagtactgagactgggttaataaggtcattggtgacttgacaaagagcgatttccaagagtggtgagggtgaagtgtgattacggtgctttgaagagacagggagaggaagcgaaggcattcttagggagttgcactttatgaagagcagagaagtggagtgga

SEQ ID NO: 62 - DNA, 170508 bp, Homo sapiens
tttatttatttttgattaaaaatttttttttaaaattctactttaagttctagggtacatgtgcacaacgtgcaggtttgttacatatgtatacacgtgccatgttgttgtgctgcacccattaactcatcatttacattgggtatatctcctaattctttccctcccctctccccccaccccacgacaggccccggtgtgtgatgaattccatgtatttaaatgaataaatcaagcaacaaatgtatcaagtaatgtcacacacttcattggacaaatattattactttagggcaagaactaataaaaacaaaatgaataggttacagaaaaaatattgagtaaataataatccaggtagtacatgtcagaaatcttaatagcttattcaaatgactagaacatattttttaaatggtggaatagaaaatgtgaaggccgggcatggtggctcacccctgtaatcccagcactttgggaggccgaggcaggtggatcacctgatgtcagaagttcaagaccagcctggccaacatggtgaaaccccgtctctactaaaaatacagaaaattagccactcatggtgatgggcagctgtaatcccagctactcaggaggctgaggcaggagaattgcttgaacccaggaagtggaggttgcagtgagccgagattgtgccactgcactccaacccgggcaacaagagtgaaaccctgtcttaaaaacaaaaaaaagaaagaaagaaaatgtgaaggaccctttatatttttttaatgagtggactcattatttccagagtcatagcccccaaatattatcagaacctctaattgtccaggggcaggggcacattcccagttctccttttgccacagggcacagcccaatgctggagccctgcaaacccttaggaaactttgctgaaagtgtgctgtgtccaaaggagcctaggcgactttgctgatctgtcaccaacttgctgtgtggctttgggcaagtcacttcacctctctgtgccccagattttttctgtataaaataaatgtgtgaacaagtttgtatctaaagtatattccaatgctatgtttctggttggaatgagctaattaattaaaaaattactaagtggatattacctctagctattttggggggaagtaccctagcctggggatttagagtgggactctgggtgcagaataactggtttgaatcttgtctccaccacttttttctttctttttcttttctttctttcttttttttttttttggagatggagtcccgctgtgtcgcctagactggagtgcagtggcgcgatcttggctcactgcaacctccgactcctgggatcaagcaattctcttgcctcagcctcccgagtagctaggattacagcacccaccaccatgcccaggtaattttttttgtatttttagtagacatggggtttcaccatgttggccaggctggcctcgaactcctgacctcgtgatctgcccgcttcgtcctcccaaagtgctgggattacaggcatgagccaccacgcctggtcaccaccacttctctctgtgtggctttaagcaagttacttaaattccctgcacttcagttttccgtagagttcatgtacatcagttgtcaaagggcagatgtctggcacattggaaatattaccgaatgttagttatccgtgaatcgggggactgattttataaccacccaaatcatatttatttcctagaggaatgaagatgaaaatagtggtggttagtgtctagcatcgcactatgtttgccaagattaatttgcaatgagccgttttcaaacaggatgttcagccactatatgtacttcttgaagtaaccagcaggtggtgaagttggattatattttagatggtcagggcctggtgtacctcttgcctggggttttgtgagagaaaaaaaatagctttcttttttatcagcaccccaaaccattaacatctggaatcaatagaggctgtatctgtcacttaatgctatagaaattgcaagaaaaaagtcctgctggttagtataccagttctcaaaatgtcagcatcatttgtgtcacctgggggtacttgtcaggaatgcagtctctctggtcccaccccacaggatggaactggaaactaaggatgagcccagtcatctgtgtcttcaagaactctccagtgattctggtgcacttgtgttatagaaccgctgtgctagaggtcttagtatttgctgtgaatgtgagtaggtaaagagagggtatttggtgagtgtcactacctcagtgcaggccagggaccagtggttccacatcaatgtgggggagtgttagaatgcatggtctctggccacaccccaaacaagctggattgaaagtcgcattttcatcagctcctggagattctcctggagattctcctgtatgatctctttctctttttctttccttctcttcctttctcattctcctctctcttcccctttgccatctccactgctccctttctcagtgacaattgggcatacccctcgcagtgccggctgctcaggtgggaaagtggagaagactcttctatttcccagcctgagaaaatttgcttacctgtaatcccagcactttgggaggctgaggcgggcagataatttcagcccaggagtttgagatcaggctgggcaacatggcgtaacttcgtctctacaaaaagtacagaaattgacccagcatagagtcgtgcacctgtagtcccagctattgaggaggatgagctgggaggatcatttgagcctggaaggcagaggttgcagtgagtggagatcgtgccactgcactccagcctgggacagagtgagaccctgtctcaaaaaaaaaaaaaaaaaaaaaagaaagaaagaaaacttacttgaagcctactggagacagacagctaaacatacagtgtgggacacctgtgctgccacctgagtgccaagagcagggaaggaccctttgggttgggagcttcgcacagagggtggccttgagcagcacctagaaatccagttgagatcttcactttctccacatcctcctctccccctgtcgtctgttgttctttttctacttacctgccttctggctcttttcacctgtggataatttattcccacaactcagtctcaccaggatgacttaaagtctaaagtacacgtcagtggttctcaaagtgcagtccctttccagcaacatcatcactttggaacttgttagaaagacagattctcaggctcactccagaccttgttaaaggaaactttaacaaggcttccagaagattctaacacacatgacagctagagaactgtggctttagatggtggcagaaattgttcattgcctactcaagccacgggttcaaattcttcttggtaacagacccagataggggtccaagtttcaggtgagtaacaaacactgttctcagaaacagtaagctctttcccttgccccaggggaatgaaatacgattcgtctacactgcgattctacttcgcaatgacatgtagtggcaaattggggacccaagaagcaactgatggcacagtcttaataaggtaatttaacgggcatttcctgaaaataggctatttataggaatgtgaatgtgtagtaacgcaaggaagagtgaagtaaccacagaaaacagcctgagttgccttccctgtgagaaggatcccttcaactctagacctaagggagcaagaaaggagaatttaggagagagtcaagttggggagtccttgacaggagcaatgaccttatctcaaagtcctcatccagcctgaggtcaagccaggggggatgtcaggggactccttcccctctccccatcattgtcttctctccctgagaccttgaactggcaccccccattggctgagaccatccgggtatacaggaaccctaaaatctttacaggtaggctttaccagtctacatagggtattaaagagcagaatatgagtttggggagcaaaaggaagacatcctgttcattggtctaggggtgagcaggtggcccaatctggccaatgagacatatgggaaagtctgctggacgcttctggaaacattttctttcctgactgtcgtagaaagaaggctctcctttctacttgcttgggatgcttttgagaggttgcacttcttggactttgaagccacctttggccacaaggggaatgcaaagagaactactgtcaagaacctggatacccacagagctattaaaaggccttggaacccccagctccagccttcttgttaagcaaacaatggatgtctctatagtttaagcttctgagggttgtgtgttctgtaatgggaaaatctgtggagttattgctaggaatggtaatggtgaaatcattaaaacacagaccccaattcagagtcaaattcagctgtgttgatgcccttggatctgattaaaagagcttccttcttatttgagtaggggaagtggattctggaagacaatagaatatggacatggaaaggcatccctgagtgcctgaggagggggcttctgggggaagagcctggcagtgatgcctggagagtcagggtcacacccctggcccaggcagagggcactgctcaaaacaccttgtacctccccaggcaaggtccttgtaacccatgacctcagagcattgagtactttagctcagcttcatctgtgatagagaggagacagctcagcctgtctcctgtgaggggaagatttctgtgtgtctgaaggaaaagttctctgcactcgcccaatgcacagcacttcacagctgccctcaccccagcatcgcaatcctctcaactcctgccctgtatcagcctctcccctccccaaacagacaggcagccaggagtaaggccatggtggttgactcaagcatctctcttcccaggctgaagttccacaggtcttgctctaccagctacagtcctgtgacacttagcaatggggtatgttctgagaaatgtgttgttaggtgatgtcatcattgtgggagcatcatagagtgtacacacacaccttcatggcatagcctactacacatctaggctagatggcttggtctgttgcttctaagatacaaaatctgtacagcatgttactgtaccgaacacctcaggcaaccgtaacacaatggtaagtgtttgtgtatctaaacatagaaaaggtacaatacaaatatggtgtaaaagattaaaaaaaaaagatacacctgtgtagggcactgtattagtccgttttcacactgctgataaagccatacccaagactgggtaatttacagaagaaagaggcttaatggacttacagttccacatggctggggaggcctcacaatcatggcaaaaggcaaggaggagcaagtcacatcttacatggatggtggcaggcaaagagagagagcttatgcagggaaactcctgtttttaaaaaccatcagatctcgtgggtcttatcactatcacgagaacagcatgggaaagacccgctcccatgattgaattacctcccaccagtttcttcccaccacatgtgggaattgtgggagttacaattcaagatgagatttggatggggacacagccaaaccatatcaagcccttatcacaaatagagactgcaggactggaagttgctgtgggtgagtcagtgaatgaagagtgagtgaatgtgaaggcctaggacaggactgtgcacaggactgtggaatttacaaacactgtgcacttaggctacactaaatttataacaacatattttcttccttcaataataaattaactgcttactgtaacatttttactttataatttttttagttttttaaactttttgactttttgtgataacacttaaaacacaaacacattgtatagctgtatgaaatatattttctttacatatttattctacaagcttttttctattaaatttttctttttatactttttaagacattttgttaaaaaacgaagacacacacattagcctaggcctacacagggtcaggaccatcaatatcgcactgtcttctactttcacatctgttcccactggaagtcttcaggggcaatactatgcgtggagctgtcatctcccatgataacaatgccgtcctctggatacctcctgaaggatctgcctgaggctgttttccagtttttttttttttttaaatttatagctagaaggagtgcactctaaaataatgataaaaattatagtatggtaaacacaaggcaataagaatattttgattccattataatcttatgggactgcagtcatagatgtggtctgtccttggaaatggtatgtggcacatgactgtgcttcgtctgcctctatcctctcaatcccaagcgcctatttctctaatagtcagaggcactgacagaaagtcaacacacgcattctgactgagctgcacagtactgaccctgttagtggctctgaaagtcaaaaacgctttagccttccatcactaatctcattcctcttttgtttgtttgtttgtttctttatttatttatttcctgagatggagtcttgctctgtcccccaggctggagtgcagtggtgcaatctcggctcactgcaacctctgcctcctggattcaagcgattttcatatctcagcctcccagatagctgggactacaggcatgcatcaccatgcccagctaatttttatatttttagtagaaatggggtttcaccatgttgaccaggctggtctcgaactcctgacctaaagtgatcttctcacctcgttttcccaaagtgcttggattacaggcatgagccactgaacctggcatcattcctcttttaaagcttattcaaaccaattactttcattgaacttgccaagaattaaatggagaggaagaggtttcatgttaatcaggactcctctttcccagcttcttgagtcattttgcttgagaacaaatatgatcaaagtgcagagtgaaggaaaggcatacgtagaggaaagggggcttttgtatgccaagccctgttcccacacctcatatcatttaatccccaaaccataccaatcaccccattgtacaggggagatactgaggcttacaggacgtagcctaatcccctgcaggaaagaaggtgtggatctggaactgaacggggtggtctgggaagaccacctcgatgaggtgacatttgtctggaggtcacgatgaactgagaaaacaaatgatatgaatatttagaggaagaatcttccaggagaaggcagtgaagagtgcaaagatctgagagtgagcaggcttggtaagttccagaaagagcaagatgactagtggagtggggtgagaaaaaaaaaatgcagtgggtgaggtcagcagggtggaaggggtggggcagataaggtaaggtcttgctcgattgtcccctgcagtcacacatatgggactcaccccattccctctgcttgctggtccctgtccaccccacatggtagcatttcccatgctgagtcaaagtggtctcttcacatctgtatttcccccttgactgaattccctgcatccagctttgtattctggctcccaatggagtcttacctacaggcaggtccctttgcttgagccggggggcaaatgaagtttcttgcacaaaatcagattatgctggaatgcagacacatctacaaaactgtgcttcgtaaaactgcatcatctttttcaagaatggtcagtaccttcctggctgctctctgcttgtgaaaaactgagtattttctattcctctttgaaattcacatggaacataccagcatataaaaggccctgggaattgtggaatcaacagactttattttgttgaacctacctttgatttaaaaaaaagtttgttgagcattagaattttcaaaagacatatggctttctagcagaactagttttccagggaaagcaatttggaaaacactcagttgagtggagcagcagcaatgggaatcaagaaatagatttcgtgagacgtgttcattctttacaaggcctaggccttttaatattgccagtgaagggtaggaatggatgaactttttcagaatgaattgattaattcattaatcattaatgaattaattcatttaattaattcattaatgaattgattaaatgtgtattcttaaaaatatagggaatttggttagggaaccacagctcttgcgttagatgtaaattgctgtgtaacaaattacaacaaacatggcagctttaaaacaatacacatttataatcccacagtttttgtgggtcaggactctgggtatgggttaactgggttttctgctcaagatctccaggctgaaatccaggtgtgggctggactgcactctgatccgagtttcagtgtcccttccagttcactggttgttggcgcaattcatttccttgcagcggtagaactgagaatcccttttctgctcaccgtcctccagggacagctttccacccctagggggcgcccacagttccttgccatgtggctttcctagaccattcacaatgtgacgtttactttctcttttttaatcttttttattattatttttaattgacgcaataatcgtatatatttataggttagagcttgatattttgatgaatgtatacaatatagaagatcaaatcaggataattagcatatccatcatctcaaatagttatcatttctctgtgctgggaacattcagagtccactcttccagtgatttgaaaatatacagtaaattgttaatgatagtcaccctatagtgctgcagaacactagaccttgttcctcctatctagctgtttacccaccttggttttccctcctgcccctactctacccaccattccctgcctctggtaaccattattgtcctctgcttttatgaggtcattttttttagcttccatatatgaatgaaagcatagagcattcatgctcatgaaagatgagatttatctttctgtgctagactcccaaagaaacaggatcagcacctgacaaccgctgagctttcttttgacctttggatagtagttgacagtttgttttccttctgcaggttcattgctaggatttccccataatgcatgtgttccagtggggaatgtggcacatcccaggcaaggtcactgaggatttttgagcaatcattttctccaggtcactgtggtcaccggggcatagaaggtgaaatgctccagtctgtaactggtctagattggtagtgatggaaaaacattcttattgtcagtgcccagccactgggcggtggggggggaatgccagctggcaggggcactgagaacaaaaccaaatggatagtacgatgaagcaaggatcaccaggtgcataaaaggagaaacaactaccatttatcgaaggccagtaatgtgccaagcattgtgccgagtgctctttttgcagatgagaaaactgagtcttggaggttttatagctcatccaacgtcacacagctaggacacggtaccagggtacaaatatagactaacacaaaactcaagttggaacacaatggttgcacattaaatcattatgtaatgcaaagagctggcctagaagatggtaataaaatggcttacatagtccctgtcgtgctggaaaagtggtatttataagcaagagctaagcttgcctttaaatttgtcaagctttggaattgagttactgtttctggacatgtgtcacacctatacattgagatgatattctctttgcctggcaaaataacgaataagcaattgtaaagtcttttgatttttgtagggaactatcataagccttcctgatcctccctaatcagcaggctaagtcagtttgctgccatacatagaaggagcaggttttggaagagacagttgccagctctgccggtttttatgttagtgttcagttagctcacctataaaatatggataatatccgccagattgtaagactcgaatgaatgatttaagttcagtgcttagtaggtattcatggctataatatcctcactggtgtagcagagaagaggaaaaagcaatttattctaaccgtggatgctgagctgtgtatgaaatgtgacttgatttttttgggcagtggagcagtgggggtgggtagctgctatcttccagaaagggaaatgtgtgggatgatgaagaaagtactaaactctgtacccaagaactctgttcaccatcttcccactggcctctgggcctcagtcttctaatgtgttaaaatgaggcttttttagataaggtgaagtctgcagggtatttgttccaaaggatgggtgtagggggttaataattaaagcatgctgtgatccaattagggaaacaattgcaaagcaaattaaacagattattgttattatccttagacttctcagaacctttaatgtgccaatgtgtgtgctagctctcctagaaggggcgtggtagagagtttcccaaactaatttgaaagatgcattagaaacattttatttccatcatccccaaagctcctcttgacctgaaattctatgattctaatatctacgtcatgtagaatggctggttctttagaggacagtaacaacatttttctagttttgacttaggattttggataaggcaaattctacttcctgttacctctggagacatacgcagtcattcagttatctctcttgcctttgaactgggtatacatattcagttggattatttatctctggatttgaaaggattgcatttaattttgaatcaaggggaaagtgatcgtggtgttctgagtcactagtgaagccagttacaagccagcctcaaagcaagcacagtcttgcactgattaggaaacgttgagagaagatggcagccagaaatatttgaagctttaacaccaaacagttgtgacagcaaaggtctccaatttttgcttttcatcttaatattatctttatttataatatttttaaatgatggaactactaaactgaaaaatagtgaaagctactaattattaaagtgcttaccatgtgctgttgctattctaactgctcttcttgcattatagcctcagtttcatccctgagagacaggtcctattttctccattagccaggcaaggaaacgggcagacaaagcagattttctgaagttacacagcttagaggagagtggtccaaatcccgtcttcatcagttcctggccatgtggctctggccaactggcttatttgctttaaggtttgttagctcttctactaaactggaataataatgaataataataacaatgataatagtttctaaatgacgaggtcgttgtgaggattaaacaagctattatatttatggaatgcagtgttgcctgcacagtcaatactcaaaatctgctagctattattttaaaattatggttattattactatattgacatgtatgttaggaagctgttattctatctcagagataatgcttttaatataaaatataaatataattgtgtgtatatgggataggtataaatcttaagctattaattcactgttatgcctttttaaagtgtgtagattatgtagtcataagttaatacctatagctttcattctttttccaatgaaataaagctgttcattaagagcgtcatgtgaaccaaaaatttggaataaaatcatattgaattgtaccagagtaggaactctcatagagtactggtgggcatttgaagttgcaaaaaccatggagagggaataatttggcaagatctagtaaggaggaggctgtgcatgcctgtgacctagtaattaatatcctggagggactcacacatgtatacaaggagacttgggcaggaatgttggtggcagaaggatttgagatagtaaaaaatggaaaccaactgaaggttcagcaactagataaaacaaatgaattagagctctaagtactggcaaggtaatatcataaaagtaaaatattgaattaaaaggaaattacaggaaaatatatgcagaataaaatctgcaaacagtatcataaaactgatcatgaacatattcatatattgcaaaaatatcatacaagcttgaaatagtgaataccaaattcttgaattcagaatggctgttgtttctggataaggaggaacaaagatgggtttgctgaaaagaaggcagtgcaattcaactgcatctgggatgtgatttttatgaacgtgttggggcatgaatgaccaatgccaagatttgacaaagctggatggtggctgcttttttgtatgcttgaaatgtttcataattgtaaaaaaatcccattttattacttgttttgccttctctcctctttttgtcttcatctgtttcatagtttcaacagacttagcaccttatgtctaggtgtacgttttgaggggacagcaattttttgtgctacaaactttctgtaagaggtcttggacttagggattccagttctcagtgttagaccttgttttctgctgggttcagatgagaggtcatacagtgcaagctggggcccaagttgagttaattatttaataaggcttccacttagtctgtgtaaactccacgagctctcctgatggccaactcattcacactccttggcccacagagggttcagaagggccaggaggtgagacagttggtgagaacaaacggcatccttccctgctgtttatcagtgtttctgctgcttgctcaagtaatcaacagcataggtagggcttaaagaggaaatccggtgcctgcagaattatgactgacctattgaggaaaggttcagagaggctggggagtttgtgaccttccggttaaagtgtgacttcaaccaaggcagaccaggagggtgggtgaggcatccagttcatagatgagatcagtgtcaacgggtacaaatccagcagggtgactccatgcgtgtgtgtgtatatgtgaataacacaaagcatgtcatgaaatagatgcattaaatctgaagtatgtaatgttgtatataatgtcttaaaagttcccaattcagcacaccatgaaatgtctaaccatgacaattaaacaatgaaatggctcgacaggaagggcttttgcattccttacagaacttacattccaaaaaagccaggtggagacataaaacaatccttcctcatagatggtttgtgttgtgttggtttattttattttattctattttattttgataagaacatgtaatatgagatctaccctcttaacagacttgtaagtgtacagtagaatgttgttatctatggcacaatgttgtacatgggtctctaggacttacttatcttgcataactgaaattttatatttgttgattagcaactcccatttcctcctccttccaaaccctgttaacctacattttattcttcatttttatgagtttgactgtttagctagctcttataagtggaaacatgcagtgtttgtccttctgtgactggcttgtttcacttgatgtaatgttttcaaggtttattcatgttatcacatatttcaggatttccttctttttaaaggctgaattatattccgttgtatgtgtgtgcatgtctatggaatataattatacatgtacacacatacaatggaatatatatatatatatatatgtatatatatcacatttactttatccatttaccctttgatggatatttaggttgtttccacatcttggcaattgtgaataacattgctatgaacacagtagtgcacatacctcttcaagatcctgaattgaattcttttggataaatactcataagtgggattgctggatcttattatgaagcaaaattagacaagtgggactacatcaaactaaaaatcttctgcacatcaaaggaaacaataatagagtgaaaggcaacctacagaatgggagaaaatatttgcaaattacatatccaataagagttaatttccaaatatataacttctacaacttaataccaaaaaagaattacctgattaagagacgagctaatactttaataaatatttctccaaagaagacatacaaatagccaacaggtatgtggaaagatattcatcactaatcatcagggaaattcaaataaaagccatgaggtatccacctcacacctgttaggatagcctttataaaagaaaaaaaaaaccacttgtgtgctgttggtgggaatgcaaaatggtgtgcagcttctatgaaaaatagtatggaagtttctggaaaaagtaaaactggaattaccatatggtccagtcatccacttctgggtttatttgttttaaacacatgcatgtgttcacacacacacacacacacacacacacacacacacacacacagcctttttcctttttagcttatttattttgtttcatatgaggaattgagaaagcaccatggggtactggagccatggtggtgatagctttctagaattatctgagactaactgtgtggtcagaggcatttctcatctttgttcttgggccagttggtctgacgaggtgagaagctggatggggagccccctcttcagggaattctatttcccacttcaagagtgaaccgtagtcatcagcccatgggctttggtgtctgagagatgtgagttcaatttgggctctttccagttctacaacttgatgcaagttactcctctgagcaataatattcccagcttaattaataaattaattaataaatgctcaataaaaattatcattactgttattattttattaatttcatttgtaaagcaagtcttctatgtaaccttccagtgaaatcaggaaagaccctactgtcataatttaaaacaagttttgtaaaacttaattttcattcctttatcattggtaacattcacatggttcaaaagttactaaggctatcttccccagggccttccatggaggccttcactgtgttatgcctttttaaagtgtgtagattaggaatatgcaaacaaacaagcacatacatgtaccaggtagttacttactaagtagactatgtgagcactttgctttttttggtcacttaatgtttctgggagatatttcctttttgttacataagaggtgaagtcattcttttgtatgactgtgttgtttgacaaatggattcttttgattttttgacttttctttcagtcttcttttgcagtggaatacctaggagttgtgttgtatttcttcattttactcatttatttttcttgtctgtgcctcttgcactagctgagccttgattccatcatgatcgagggattccaccaaattcactatttgagaagccctgtggtgtgatgcatatcagggtatatgccccaggaaggtgagtttcataatcaacgttgctgattacaatcaatgtttcataattaatctactcaggaaataatttctgagcatctattatatgccaaacactgttctctaggctccagggacacagaagaaaagatgatatggcccctgaccccgtggagtttatggtggagcaagggagctataaagtcatgtagtaactacaaaaaaagcctggcagatgtcgtggtgggtaaatagaggaggccttaagcatatagggcagtggttatcaaacctcagtgtgtcttagtattccttggaaagcttgttaaaattcagatgactgggctgcactccccagagatttagataaagtgtgtttatgctggggcccagaagctacatttttactaagcaccacaagggattctggtgcaggctgttctgtagacctcattctgagaagtactggactaaaggttagtaaagaaaggtgggccgggtgcggtggctcacgcttgtaatcccagcactttgggatgctgaggtgggcagatcacctgaggtcaggagttcaagatcagcctggccaacatggtcaaaccccgtctctacagggtctacagaggacagcccctcctctctgaggctgtgctttgctgtgcttgtgaaggtttgtgcctcctctggccccgagtctcattcacacccacctgtctattcctgttggtaggtgagccctggctctagcttgggactcaggccccatgcatctcattttaaaacaaatgctctttgtattttgtaaaaatacaaaaattagctcaacatggtggcgggtgcctgtaatcccagctactcaggaggctgaggcaggagaatagcttgaacccaggaggcagaggttgcagtgagctgagattgagccattgtactccagcctgggcaacagagtgagactccgtctcaaataaaataaaatagaataaaggtgtattagtcagttttcacactgctataaagatactacctgagactggataatttgtaaaggaaagaggtttaactgactcacagttccgcatggccaaggaggcctcaggaaacttacagccgtggtgtaaggggaagcaggcacattttacatggtggcaggcaagagagaatgtgaaggaggggctgtccaacacataaaaccatcagattcatgagaactcactcactattatgagaaaagcatgggggaaactatccccatgatccaatctcctcccacaaggtccctccatcaacacatggggattacagggattacagtttgagatgagatttgagtggggacccagagccaaagcatatcagaagccttcctggagaaggtgagggctaagctgagatctaagaaatgaacatgaatttgccatgtaaagaaggtagcaaaagatcttctagtccattacttctcgaagtgtggcccacagactggtgtctgtctgcagactgtttatcgtcagtccccatcaagataggcacagaaattcagtgtttaaactttatgtggcaatttgacattgtaacgacaccccagcatgtgattagtggattcatcagtggactcatctatactgtctgagcttggtgtagacctgcttgggtgatgttaaattcatgagggcatcacatgtgacacaaactgcacccttgtcctgtatcaagatcacatgtatgtacaggatggattggaagttaagtccagcaaaaagtcccagtgctggttctgccccaaagacgggtttggggaatattgttctagacagaggtacaagaggacagctgctttggaggaactggaagaggtttagtgtgatatgggggcctagggtatgagaatgcaagtagtaggctgtaacctggaacagaaagtaaggcgggcaggttgccacctgattgagaaatttagaccttgtgcaagtggctatggaaatccactgagggaacttaattgatgtttttaggcacgaggcccttgtgtttagaaattcattataaccctcctgtgtagttgggtttccctgttacctgcagtctattttcaaagccaggtaagagttgaggaagtagcaagattatgaattcccctaagggtttactgtttatccagtggtttgcttgattcctccatgggcttctcccatgacggcccctcctctctgaggtggtgcttgtgagggtttgtacctcctctggctacaaaccctcattcacacccacctgtctattcctgttggtagataagccctggctctagcttgggactcaggcctcatgcatctccttttaaaacaaatgctcttagtgttttccacataccataatgctttgaaaaaaaaattcaatattttatttaaaaaatttcaaactataggaaagttagtagaataacaatataaatacgtttttacttttcatctagatccttcaaattgttatcatttggcacattggtttctctccttataacagatactgtatattatgtaatatatgtaatatataatgatataatatatgcacacttttttctgctaaatcatttgggaataaatggcagatattatgcccatttactcctaaaaacttcagcatgtatcttctaagggcaagggtattctcttacataagcacatgcactgatcacgttaaaaacatttaacattgctacaatgctatcatcagtagagtccatattctgatttgctcaattgctcccaaaatgctatcttaagcagttaattatctgacctaggatccagggtcacatatggtattagttctcttcagtcttctttattctagaatagtgtcttagccctcctttgttttttctgatactgacaattttgaacagtacaggccagtcattctgtaggatgacccccagtttgtgtttgttttctggttctttcctcctgattagattcaggttaaatagtttgacagaaaaactgtaggaatagtattgtgttcttggtgaatcatattccagggtgtacagtgccagtttgtccctttattggcaatatgcattttggctgcttggttaggtggggctttgcaactttcaagatgcaagtccctggaataagtttattgccatgattgtttccttgggtacaagggttgccttagagtatgtctttctctgggaaggcccttctttactcctttctaagagggcgggtctctgccagctctgccttaggacacatgatcaatcggtcaggtgacttctcccatctccaagagcctgtgttctagtgaggagagacaggcagtaaacatgtaaatgtaaatgatcagaataaatgagtcaattccagattatgataagtgctgtgaaggaaataaaacaaaggaatgggacagggttaggtaggggaaagttgccatccataaaaccaagttcctgccctcctggggtacccattgcaatgggggacatcaaggataacaaacatatatatagcaagtcaggtagtgctgagtgctgagtgccctgaggaggaatgaagtctgtaaggagagaggaatatcctgaaggattctacagagggggcagagaaaacgtcgttcaggaagtgacagttgagtggagaaagaaataaagcaaggacaagccctgtgagactcttgggggagagtggggcaggcagaggcacctggtgggcacagagttggaggcagcagctcttagtgcagtgaaggaaaagaaagaggctgggctggtttgggaagtgggctagagtgaggaatgggctggagtagggagtgggctagagtgaggagtgggctggaatagggagtgggctggagtgaggagtgggcaggagtgggtagtgggctggagtgaggagtgggcaggagtggggagtgggctggagtgaggagtgggcaggagtggggagtgggctggagtggggagtggggagtgggctggagttgggagtggggagtgggctggagtggggagtggagagtgagttggagtggggaaccaaggtggggccagggccagaccctggaggcttttcagacctttttcaatggtaacgacattggcttttatattcatatagagtttgggaaaccgttggggtgttgagagcagggagaggcatcatccacgttttaaaagtatcagctaggccactttgtagagaaattgatgaggtgggaaggattgggtccaaggtcaaagtcaggcatctaattccatttcaaatcctaagtttcgggatgtatgggaaaaagagacacgggagagggagagaagtggcctcttgagatccagaacaccagaccagggagaggccagcaggctctgtctcagataaggggcaatttctgtggtcagccaaagccgcatttgaatctcaaagcagaaaacccagtatctggaagaaaaacgaagggggctccatgggaaccgtgaccttgttctgttcacctgtgcctccccaatgcccactaagggatgctcaacaaataaatagatggatggatggctgaatgaatgatgcaacacattagcttctattattattaatgttcaagtatggaaacccatctcctgagggtgaatttgcaccatgtcaatttagctaaagtgggactacgtttcccggagtttgctttcttctctatcccctgctgggagttgcctgcaagagaaatgtgcacgtgacttagaagagggaagtgaggagccggcagtttgaagcatctgggggtcagcatggaaccaacatgttcgcagctgccgcaagctgtggcaggtcagcaggctcatcttcttggcgctgggcagtggctccgttcctggctcctgaagcccctgttgaccaactccttctggtcttcaaatcctggtccaggcagatgtgtaactgcatggtgaggaggctccaccgctcatgcaggtcacatgcgtggttgagatcagagaccacgagaaaagtcacagctgcagtgtatcacgaaggtttcatgctgttctttagccttcctacttcatgcccatcttctcgacagccggttctgctgacttcagctgacttcaggagcggctcccacagtcatacaaaacctaatctcataaaataccccttcaaactcactcatcctggtcctgcttccctgaccaaatcctgaggatgagactggatttaagtatttctcaaccttggagcttcttgggctttgctattgcaaatgttaagtaagaatattaattttaaaggcatgtttatcaaaataactgatcaactcagctattttaataccagcgattctcacctaaacatacggaattgttttcaaatgggtgaatatgtttctcttcaagttttatagatgtttggtaagaaagcaagtttttcttttttaaattgtttgcctaagagggatataaggaaatgtctgtgttcgattttgcaatatgtgtgcgaaatgactttgcagtgagtcgtggaggtgatgaagttcagctggcaatcattggcagaccccgccgcccccccgccacccccactacacacacacacacacacacacacacacacacacacacacacacagttcccctgcttgggagctgtgacctttaactgagttcctgagattaaagtttagtcctagtttgaggctagacctaaaagattttaatttttcagatatatgggggaaagagacctgaaagaaggagagagaggctgggctcagtggctcttgcctgtaatcccagcactttgggaggccaaggtggaaggattgcttgagcccaggggttcgagaccagcccggccaacatggtgaaaccctgtctctactaaaaacacaaaaattagccatgtgtggtggcacatgcctgtaatcccagctactcgggaggctgaggcaggagaatcacttgaactggggagggagaggttgtagggagccaagatgacaccactacactcaacctgggcgacagagcaagactctgtctctaaaataaaataaaataaaaggagagaagtggctgcttgagatcctgaccattggaacagggcggggaggcccctgggttttgtaacagctaaggcacaagctctgtgaccagccaaagctggatttgaatctcaatcatgctgtgtaaccagaagcaattgatgctgcatcttcaagtcttgatgtcctggtttagaatgtgggtgataatcatttctccatgtttgcaaaggtcaaataggactgtataccaaggactcggcacagcatctggtgcccagtgcagcagacaagggatgcctgactttgaccttgctaggtgacctgttaaataatttttctgtgcctcagtttcctcatctgtaaaatggggcctactaatagtatccacttgataacattttcatgaacatgaaatgaataaatggtgtggttaggatggcaaacactagattcaaatcctggctccaacacttaattgctgtgtgacctggagaaaattacttaacatttctgaatctcagtttctgacctacataaaatgagtctggtaataacagttaccatagggctgttgtaggagttaaacgccagcatgtatgcaaagcagttagcagagcctagtgcatagaaagtgcacgttgtgcacatgtaccctagaagttaaagtataataaaaaaaagaaagtgctcagtaaatactgtttattagtattgctgtccttatcatgataattaaccagattcaaagatctgagcgaagggcattgcaggcctaattgtctttaactcatacaaccattcttctgggtaaggatgacaccattcccattttatggagaagccactggaaggttgatagtaggtgtcatgttcatctctctgactggggagctgagctcctaaccacttcaccttactgcctctaggttatttttttgtttccttttctttttttctttttttttttgacagagtctagctctgtctcccaggctggagtgcagtggtgtgatctcggctcactgcaacctctgcctcctgggttcaagccattctcctgcctcagcctcctgagtagctgggattacaggttgcaccatcacaccaggctaatttttatataggttattttttctaagagtacctcctgaggattgaatgaatggagcagcccacttcctctgggatcactgtttctctcactccagggtttgatacacacagggcagcctggggtttgagtgcctgcattgctattgggtgtcatcttttaggacacatttgaaagccaccccctgacacatgggtaactatgtgaggtgattagtgtgtgaattaggttgattgtggtaatcattctcaacatatacatatgttaaaacagcacaccttcaatattcctatttgtcaatcacaccacagtatagctggaaaagaaagcaaagaaggaatagggtgatctctttgtgttgcaagtgatggtggggggaatggtgggtgggtggcgggggggactctgactgatcttcccgatcccctcagtttcgttactctgttgacagtgggaattctgaggggcttctcaagggaaaaacataaaacctgacctttgtgtaattctaaagcaagaccttaatgaaaacttgcttttaataatgaagaatgacagtatcaaaagtcaggaagcttctccatagacgttgcaactaaaatatatatcagtgaagatgcttgttgctaataggcgggaacacaaaacaaaatctaatgtacagaatgaatttcctctttggactcctggcgagtgaaaggtaagtagatgctagaggcattgagctctgtcgattgcttaggccgcatatttcaggactgacatgtattagctcagtgcttctccacaaggacaattctacccccaatcccagcaaaagatgtgtgtcaatgtttggagacctttttggtgtcacactgagaaatactactgtcatctagtagataggggtcggggaggctgataaacattctacaatgcataggacagcctcccacaacaatagcgaaaatctgatccataatattatagtgccaaggttgaaaagccctgagttagaaagatgttaggcagttgtcatcaaatattaacagctaaagaaaagttttttgtgtttggacatgtgtcttagctagggttgccataacaagacactacccattgggtggcttaaacaataggcatttatttttatcatcgctctggaaactggaaatgtgagaccaggtaccagcatggttgggagagggataacttcctggctggcagatgactgtcttcttgctatgtggcagggagagagagagcaagcgagcaaaagggaacatgatgtcttttcttaccaaggcactaatgtcatgagggcctcaccctaacaatttcatctaaccctaattaactcctaacagccacatctttaaataccaccatattgagggttgggacttcaacatataaattgtgggggaggtgctaacacaatcattcattccatacaaatgtaactaataaggttaaacatgtatgtagcatttactcttctaagcgctttacatgtatatgaactgatctaatccttgaacaagtctaaaaggagacaatgactttatcctcattttacagatgaggagattaagtaacttgtccaaggtcactttggttggggatgcagagcctggtttccaacccaggcagtctggctctagggcctgtgttcttaaacttgatgtgaagagtaattgacatactccatccgttgaaacttcctccagttaaaacaaataagaaattatatgtaatgactgcattggcgtaaagaaaaatacaggttggattcattatgacgtattcattatcattattatatttctttttccttctgattttaaaataaattgaaataaaaacatttttgtggtcctgggtcctgacactattcctaatggagaagtcagccttggtggcagtgggtgctgtcaggaacatgatggattgaagaaagtcaggtgtgaaaatgatgggagtttcagcagcctgggaagctgcgcccctgctctggggacagcagttgttcagctccagcccactgctaagaagtggagggaggtcagagaatgagggcttagtattgacaaactggcaaatgttccaattttagagaagaagccaagaatccaaatacaagtgttcttttgagtcaattcagtttctacaaacactattatgaaagaaagaaagaagaaagaaagaaagagagagaggagaggagagggagagagagggagggagggaaggaaggaaagaggaaggaaggaaggaaagaaggaaggaaggaaaaaaagtaacaaaaagggaggaaggcagggagaagaaggacaaagcatcacatttggtaaaggaaatgggctttggggtcagatatgccttggctggtctacttgctaggcatgtaccttgggcaacagatttcgtttctctaaatctcattttatcatctgtaaaatgggaataatactagaatgcacgtttaccaccaggatgtgggtactgaatgcgaattagatttgcatctcattgttaaagtgcggtggcatttcaaacccaaacgggaacttgcagatcagattccagtgctttctggagctagaaaaatggtatatatgggcaaacgagccaggtggggcctgtggcagactggagagctcagacccatctcaaggggaagctgcttggccaattcttgccatctggggatgtggcccatgtcagacacatctcccattttaaacagtagttaggaatctggattgtttgtgaaatgtctcatttatgtttttaatcttagtaatagattccaatttttgaaactacaaactggggctgaatgatacatgcctgtaaactggacaaggcccaggtggtcaccagttcatggcctgctctgaacagaaggcgagtgtctagacagtgtcttcctgtcttataggtgccctggtggcatctgtagacatatctgtagtccaacagggctaagttcttacagatcaggttagaatattaatttagtgatatagctcatataagaaaataagaattttttaatcagttgggtcctggacatcgtgactggcaatgtcagtctggaaaccgaagatgtcaccaggaagaaaggacaaagatgtgtgagggatggagcagggaatagactgattttttttttttatggaaaagaataaaagaggatgaaatagaagaacaaaagattcagacatgcaaatcatagtattctagagaaatttctaggcccagaaatcatgaggaaaataatgttagtttctttttccaccctttccaatgagatttttcatgagggtaggaaagtacttctcttatagaattttacagctgaatagaactaaagagacctttagttttcaagttaaaacatttttttttaaagtaaataaaataagaactgcagtgaagaaatgactggtccatagccatggcacatatgaaaattccaaatgtgtatgaggtaaagctagggctttgcatgagtgagatagaccaggtgggaggttctacggaatggtggaaacaggcaaacaagccaagggtctggcccgtccaagggggctttgttactcagctgtagccagctgtgctaagcagaaagtgggcccaccatagacagatctaactttttttttttttttttgggatggagtctcactctgatgcccatgctggagtacactggtgtgatcttggctcactgcactctccatctaccaggttcaaacaattcttctgcctcagcctcccaagtagctgagaatacaggtgcgcaccaccacgcccagctaatttttgtatttttagtagagacggggtttcaccatgttggccaggctggtctcaaactccggaccttaggtgatccacccacctgggcctccctaagtgctgggattacaggcatgagccactgcgcccgactggcaacaggtctaacttttgaaggcaagagaaaaatatcaactttgagaatgcactccctcaatttttaaaagttgtcaacaaattcaaaagtttaaaacacatcatgcaagccaaaaaagcccatgtgaggtccacatttggctgggaacctgccagtctgtgacttgcattaaagaatcttccagcatcccacacattttctgacaaggtagttctcacctcacttcctgtcaatgtttacctaagtaaggaatgcttagtgtgatcattttcttaactctttatcctgaagaaggaccttcagtaaagacaatattttaatattttacttcggtttcctatattttactttggttgcctccattattcaccaatttgtgcttgttcagccagaaattcaggaaccacaggaaagctgttgactaaagaaaaccttaaactttcatcccagttctgttcactgttttttattaaagagttttctttttatagtaaactaaagagaggatgttcagagtccaggttcatgagctgcagggctttttttttttttttttttttttttgctcagcagaaccccaaaaatagaattgcaaaaatacaatttggtaaatctttaatgcccaaatactactccttcccctaactaagtcagccactggaaccatttctgcctctgcacatgacactgaccaggaggctaagcccattatttatgcacggctgattttatttctcaattcattttgagcatctttaatgcaaaacaacaagaaaaacagcagcaaaacacccagcctgattataagccttttctcctgacttttaatgcaaacttgaagaatgagccagagatgactcataaactcatgaacttcagtttctggtgaagaccatcatttaagacaaagtcagttccccagactgtgggtttccctatttagtgaacaaacatgtttactttaaaatgctaatcaaaaaagtccttgaacagacattgtcttccccaaaattactaaaatagttaccatgtttcaaattatttagaataggaaactaaattataataaaataattgaggatagaaatctaactgatttttcacctattaaaatttgggtcacaaattatacacacacatatacacacacacgcacctacacacacatgcatacacatctccaaaacacaagatagtaagcacgggaaaatttgccaaatgtcctagtggattgatcaacaaacagcccaggtaattctgcatttcttcttggtcgaagtcactttttcttcccaacttctcactcagactaggtacaactaaaatgtagataagtaagtcactttatctgtgttttatttaagcagtacggtggttaggtgcatgaatgctacagccagcatgcctggttcggattcctggttatgccactgttattggtagcttaatgtggagttggtaagacggggatgtggaaatagcagtgtcaattcgtaacttgcttaggaggattaaatgaatgtatagaacattgcctggccctgtgtacaaattcaagactttgagctcagttagtctggagagctagcagattcttaacctttgaatccccagctaaaaaccctgtcctgacgaacgttcatgcacattttgacggcctttcagagatgctcaggccttctctgcctcccttactccccaggctaaggtcctctactctagaaaacacctaaaggaacctggggatgtgagttacatatgaaaaccactttagtcctcctaaggacaccatacatattttctgagccatggcaaaatcaataggtaaacaggtattgttagagggaactaggcctggttcctttttcaatggggtttgaaagttgtattttgtttattaggaaggaaagaagtggacctttccagtgggtgattcatcatctggttccttcaggggaagagagggagtgactagagaggattgatgtccagcctggggcctgctttgctcaacagggacctcatgaaggcaggcttcttcctcctgacatttccagcactcctcacgggcactctggagagggatctctgaatcatcgctgtgtctagacacatcaaagggcaagctgcctgtttctcaggctcaccaaacccagtcaggagcactaacgtggcaggtctccctctgaatcactcagaccagagggagggcgctgagaggtgagcaggttcacccggctgtattcgctcttgggcgagggcaacattcctccctggggaatgcaaagtcatgttgcctcttgccaaagccagtcaggtaaggagacactgttgattttgtctctgcttcctggtgccagagcagaccaagcagggctttgaagatgttgattagacgtaagccttgacgaggaatgtgactgtcattcaacagtgtaggcactcagtaaatacccggggcatgaattcaagggaacgctaccttgcaaaatgggccactcacttcagacaagtaattgaaagaaacatttaaaaattccaagagcaggaaagataaaataattgctttgggttgctcttcggaagcctaatgcaacatacagttaagttttagacttcctgactattcttcacaaatttcttttcttcaaactcatgttgttcttatatctgaatgttctactgcatactctaatagatttgatttcaaccacatcccacacaaaatcatatttacacacacacacacacatacatatacacatatgtatatgtatgcagttgattatggacatagttttctgctttgcagatactttattaaacatctattatatgtgatattgatatttccttttcacatgttagaaatattttgttttccggtctcaaccattttttttttttgaaacggagtcttgctctgtcacccaggctggagtgcagtggcacgatctcggctcactgcagcctctgtctcccgggttgaagcgattctcctgcctcagtctcccaagtagctagtattacaggtgcccgcttggctaatttttttattttatttttattagagatggagtttcatcgtgttggccaggctggttttgaactcctgacctcaagtgatccgcccacctcggcctcccaaagtgctaggattacaggcgtgagccaccccgccaggccaggtcttaaccatttttgtaggccctgtgaaattctgatcctgaattaaatagccctaagattgtagaaatgaataacctttaatggagtgtatgctttttatggcctcatcaataaatgaatttattcctgacgttcttctaaggctaatcactccaaaggatttcagagtttatctacttgaggttatttacttgatacattgaggtggttccatcctgtaactggttaagtggatagtgtactgtttggggctgttgaagggaggaatgtagctttcattttctaagcaccgcaagagaaatggagaggaggtcctgtgtgtgccctgagatcccgaaaggggaattatgaactgcgaggagcatgtgcttcaaatcgtttgcaaatttgggccaatgagatgctctttaaaatgtcatcctcaaaagagggcatcccattcatgggtctctgtatgagcagccctaaaaagcaaagagccagcatggtagctcctgcctgtaatcccagcacttgacgaggctgaggtgggaggatcgcttgagcccaggagttcaaggccagcatgggcaacatagtgagaccccatctctacacaaaacttaaaaattagcagggcatggtggagtgcacctgtagtcccagctaccttaggaggctgaggcaggaggctcccttgagcccaggaggtcgaggctgcagtgagctgtgattgtgccgctgcactccagcctgggcaacacagcaagaccttgtctcaaagaaaaagagcagactttcatttctaattggaacaaaagcccctctaaaggcgctgacagctccttgtaggactcctggttgggtgatgttggaagaccagcattctcctgaggcaggaactgtgtctgcttttctgtccatattacactccccacaataagcacagtgcacggcacatagtaggtgctcaataaatccttttatttaccacttgtctggagtaaagcattataatgtagtcattacacgtgtggcttcggagcctgactgctggggtctgagccccagctctgccacttacctactgtgtatctttgggtaggttacttctgcctctgtcttggtttcctcatctgtaaaagggggataatgaaagtacctacttcagtggatgattacacttccttcacatgcatttacgagttttctgaacatataatcctgttgagatccatgtggacttgatgattctaattatttgtcatgcattacactcttcatgcttttggagttagaatgtatatatatatttataataattttattttcttcttaataaatagtgcggacatttggatcaaggaaaaggagtgtgtgtgtgtgtgtgtgtgtgtgtataatttttaaaaattgctggtaagatgtgtcaagctaagatttaacaatctgtgatctgcacatctttagtttgaggaaacaagtcacgttttatttcattttaattttaatttaatttaatttaattttattattattatttttttgagatggagttttgctgttgttgcccaggctggagtgcagtggcaccatctcggctcaccacaacctccgcctcttgggttcaagcaattatcctgcctcagcctcccaagtagctggcattacaggcacgcgctaccacacctgactgctttcgtatttttagtagagacggggtttctccatgttggtcaggctgtctcgaactcccgacctcaggtgattcgcccaccttggcctcccaaagtgttgggattacaggtgtgagccaccgcgcctgacccacattttattttttaaaatgtgaaaccgtatcttggtcatgtctttagcagcatggaattttggaaagatgatgacatttgaggaaaggaggtgaaggaagagacttgagtttaaactggcaccttctaatttctctgcccccaaaaaggtattgatatatgtgttttaattgttgccaatatgtgtctgaaggttgaagaacactcagagaaaaaaatgaaaaaaacacatgtgtttaaagtggtccataactaaaaaaaaaaaaaaaaaaaaaaaggtggtccataactgaaagcagcctggaaatggtcatggaggtcatggaggtagtgctctggggtgcatttcactaagggctacatcatcccttgaggtttgcaaagctggtagctaaggaggatgaggtaatgcagggatgttcatctggcacatttcatctcaagagctgatcatctttaggtcgggaatgaattcctcaccccatatagaatattacagagttggctcaggtggacagagaggagagggcaaagaaattttgatgttctcaaggccaggaatgttgcccttatatgggtttccttggaggagtcggctgtgtgtgcagcttgttccttacttgaggtgtatcaagacgttcaccacaatattcagtaattaattatcccaatccacatttaggaaacagcagaggacactgtgacattatctaacaatctctcaggtcactgcagatgaaactagctttgggacataggcctcaaagattcctgtgtgtagcagtagctcattagcccttttcaagagaaatattattactgtcaaatcagaagcttttgaagccttttggtgctattctgtctaacacataaaagtcttctacccagggaggcatagtatttggtttgtacagaactgtttctcaaagtagttacttcatttgccttcaaatttctcctctattttcaccaccacttaactgttggccaattggattttttttaagtttctttttttttttttagtttcttttttttttttttaaattgtcttccttaaaattaccagcatggaaaaataaactattcccaaatgcgtgatgctgtgaatctgagagttcaaatgcagcattagtggaggttgtggttgatgggcaagtagctcatatgtcttgggataaaatgctcctaagaaggaattttggccccattcacaggaggacacttttttcctcattttggctttttttttttttttcccccggcctggacacaaagtccctagtaattttatcacaactcattttgggaatggtgattcctgggccataattgatttcaggagttggtaactgggctgcaaatcaaacacgtgggagaaaatatcttaccagtattgtcgaagccctttggtttatgtgctttggtaataaaatcctcagcaggggagttcaacaccatcttttggtttctgtttctaggtttcttctttcttgcttgaggaatgggttagtatgtgggtttgtgcaggagattcagagagagggcctaagattccgcttaggcttcatggggttcacatctttcgatttggggcctatttgatggctttgctttattttaaagtgttttttgtttcataaaacttatttctttcttcttagaggtcatttgtagagattgcattaaggcttacagttttgttgtctggtagaatgctttgtcttctttttaaaaaaggaactggcctgctagcttggcattagtgtgtaatgatgacatcatttatttgtctctataggaaataggcattcattcctttttttttttttttcccagaggggaatgagttcatgttgagagtatatgataggatgtattctccctggttatcataagcggacgcattttttcatttacttggaagatctttctgaaacataacctgtgcaaaggactagggttatgggagaaattataacagacaaggctgctgttctacagaagcccttcgtctagtggtagtgggggcacagatgagcacacaggaaaatgcagaaagataaatgctaaagaaggaggccttacccaaccttgggtctcagggagacctcagggagggagtgacagctaaggggagatcggaggggtgagtaggagcgggacaggtaaagacggggtgggagagttaggaatttctgataggagagaacaccccacagagaaggaattgcaagttccaagtccaggaaagagaactttaattacatttttcaaagtacttatacatatgttatgtttatttattttgtaaccttgagttatacaactcagagtctcagttttcttatctgaaagatgggataactatccccatctccaggggagaccgtcaggaaaatccgagataactgacagagcgttcctcgttagctcacagctgtttacgagtgtctggcacacagtctatgcttcataaaagaaactgcctttactgttgttcttacattcttcttctctatcttaatgtttccctttgcctaatttgtcctacctatttttaaattatttaattttgcttgaagtatttctctctctatcttttttttaattgtagtaagaacatttaacctcagatctattattttaacatttttttaaacttttattttaggttcggggtacatacgcaggtttgctatataggtaaattcaccttatggggggttaatttcacagattatttagtcacccaggtattaagcttagtacccattagtgatttttcctgatcctctctctcctcccactcttcaccctcaggtaggccccagtgtcggttgttcccttctttgtatccatgagttctcatcatttagttcccatttataagtgggaaacatgcggtatttggtattctgttcctgtgttagtttgctaaggataatagcctccagctccacccatgttcctgcaaaagacatgatcttgctctttttcatggctgcatagtattccatggtgtatacgtaccacattttctttacccagtctagattttaacagatttttaagtgtacaatacattattatctatggatactatgttgaacagtggcagctctctggaactcatcttgcataactgaaactttattcctgctcaatagtagctccctgttttcctctccctgtagtctctggcaaccccccttttactatctgatccttagaagtcctcctcacacaccgtataggggcaggatatagtttcctaccccttcttaagacaatcacaggcaagagcactgtcacttacatgaccggttaagagtaagtagtgtataccctgtacacattgtgacagcagaaggcggggagattgaaagaattcagtaacacaggggttctgccagcacagaacagtgtccactatgatcttttttaacccaaatgcagcattatgcggagtttctctttattttaaagtgaaaactgtgatgtgactagtcacacctgacttcagcgcaccatctaatgagagcctctgtgtcagaatgaattgagctataataactactaaattgactcataaggacttacaccaaaaggagatctatcatcctacagaattagaaatgcagagggaggatggccctgaggatggttaatttagcagaaaccaacatcactaaagattcaggaaagttccatcctctttttccattttgatatcattgaagccgggagttcactttgtgtcttcgttttaaaaaccaggagaaccccagagccctaagaacaccttccctcacaattcactgaccagactcaaatcatatgcctcctactgaatgaagaggaataaaattatcagggatggccaaggctttaagcaagacacgaactctaaggatgccgatggtctgtacctactatgagaacctgatatctgaagttaggattccactggtaagaagaaaaagggattgggcaatggctagtgggatacacttatcatatctacctgatacacattttctttatatttatttgtgcaaaaagaaaaacaaattctctcccctttctgcttagaccagggaggtccaaggtatttggaaagaggagaggttatgccaagtaaaaacaagcccacaaacctccctaggagagacacacgcataccttccacatccggatcagggtgctgatgatgatggtgatggtgagtggaaaatctcaagttccccacatctgccaaagttggagcagctgctactaggagggcaccagatggtaggtccttgcttcctgtactgctcagagtcccagcagaaaacagaattccattcagatgtttgaccagagacttttttctttccttttgaaattatactttcagttctgggatgcatgtgcagaacatgcaagtttgttacataggtatacacgtgccatggtggtttgctgcactcatcaacccgtcatctacattaggtatttctcctaatgctatccctcccctaaccccccaacccccggacaggccccggtgtgtgatgttcccctccctgtgtccacgtgttctcactgttcaacccccacttatgagtgagaatatgaggtgtttggttttctgttcctgttttcatttgctgagaatgatggtttctagtttcatccatgtccctgcaaaggacatgaactcatccttttttatggctgcatagtattccgtgaagtatatgtgacacatttcctttgtccagtctatcattgatgggcatttgggttgtttccaagtctttcctattgtgaatagtgctgcaatgaacatacatgtgcatatgtctttatactagaaggatttataatcctttgggtacatacccagtaatgggattgctgggtcaaatggtatttctggttctagatccttgaggagaaccagagattttttttagttactatttctaaaggcatgggtaggttaagaaaactagcaagggaggatgagacacccaagactaaccaccgtgcgaagtcataaggaaagcttagcctgaagggccaagaagatgaaataatttttgcagatgctaagtgaaactgaggcagtgaaggaggggcctttgggaggagctgtagcctagaggaaggaagccagtgccagacacgtggccagagaggccatagaggcagggctctgatctctctcacttctcagcctctgatatccagctggtgcctgcttccattggctgagcccaaatgtaggcactggcaaaggagctggagcccagtgatgcccatgtggaaggcagcctctcggggctagaggagggcagagacggatctagttgggaggacaaacagatggatgggctgatgtgatcccagacacgctcctccaactagggcattctttctcaagagcctcgattccaggcagagccacatggcgtctcagagtcagtgaatccacccgcagtcagcaaaggagcgcctttggctttgttttgcttctgcatggcttgtcttttattcttctgctcagcacttctccttctcctcattttcctctctcctgcttttctcttctttgtcttctgtcttcttctttgtcttctgctcagtatctctctgattcttgaagcctttctcagcctaataagggccctaaacttccactggaatcatggagagctcttttctgtccttttttattttttagtgaataagagtcagattcaggtaggacaggtttaattttgaaacttgaaaaattgctcaggacttcctcttcaggatatgagcattggtcttaaatatcaaaagaaaacaagatttttggtagggttcttttagataaatgcttactacttacaacatataggaagaggaaaaaaaaaacaaaaaagtgataaacattataaatagtgtatttcttcacttcctttaaccatcatttgcatatttgtgcccagtgtccaatactaagtgttgctttcaccactcaagtgactcttgggacctgtcctgagagctgtggtttcaggctggatgcaatgaagtctttccaattgttatacaattgactgtgagctacttaaatctgccacttattaagaatgactggttatgaatcatcccagttcccaaatatgatgatgaatttgtgattactctgcaacagttttcaaaacaagatctcatacctttcatcaggaagagggaaaatggtttcattttcaacacaggaatttgtttccctggttgagacataaaacatgtgtcttaatggttctgcaatgtgctgggatttactctgaaaggatagtgattcacgaagagatggagtcgggtttcacatcctttgaagtctagggttgcccaattgcagtcatggagcaacatgcagctgagaataagagccaactgttcctgagtttgtctttaacggttaaacatgcctcatgtggtgtgtcaaaagcttataaattcataattggggcaaggctgctgtgggtttagttgccaataatgtgttgatgttgggttcagagtgcccaattaggatggaacataaagcaatgcatggcaacgaatgaatatgagatcactcatgtttcagtggaattttctttgaagatccacaaaactggagaaatggctgcccggataacgctgacatcaccatgtggccatattcagagggctgaagaagtcctgacaaactaaagtggggtgcttctgaagttccctaaataggattggataaagtgtagggatagagagatggtcacatgcaggattccttcccacctccttcctgtcatatcagaatacttgttactgtggctgaagtgacatttccatccagaagccaggatctggtttagctgtgcttgtcttccttcccggagctgagtcatgaatggcagtttgggatcctccaaagtgaaaggtgtcttttgttcagccactcgaggctgctctctcactgtgctcagttacagtttaactggcatttccttgtcagtactctgtgctgttgtgtaaagcagattcaagctattctatttgcttcttcttatttgtccactcacacagtcactatttatgatgatccttctatgatgaaggcactatttgagatgcctgaaaacacaaaagtgagcaagataaacgaggtcctttttctattctattcttgttgaggagctagataagtaggcaaatggacaaactaataaaataattttagacagtgctatgggatatgaaggggctaagaagggatgatggtgtaacataatttgtgagagttgcgcgatggccacattagatgaggtggttctctctgaatatgtgaattttatcctgagatctaaagaataagaaagagtcagcaatggaatgatctagaggaagagtgttctgggtaaaggactcacaattggaagagtcctcaggcagggaagagtgttctgggtaaaggactcacaattggaagaagtcctcaggcagggaagagcttggtttattaaagaaacaacaagaacatcaacagaatctgtgtggctctgctccatgagaaagagggtgggggataggggactatgtcagaaagcaatgggagctggttatgcgggccatggtgagaagttgggatcttgttcaatcataatccacccaactgtgttttcactccctatacttccactcttccctccctatactttctctcttccctccttatccatctccttatccatggtttatcactaaaatcactcccttgaaaatatcctgtcctttggtatgagttatctattgctgtgtaacaaattaaacaaaaaatttagcagtttaaaataagaagaatttgttatctcacacagcatttgtagatcaagaaaccaggctggcttagttgggtgattctgcctgtaggtatctcatgagtatagttatctaaagatcatactggggctgggggggttcacttccaggttgactcactcacatgcctggagagttagccctggtttttggcagggagccttagttccttgtcatgtgggtctttccataggacttgttgagtgtcctcatggtatggtggctgactttgcccagagacagtgagccaagaaaagggaaggtgaaagtcactatgtcttttaggatctagttttgaaagtcatatatcattgtcttcataatatctaagtagtcctaaaggctatccatactcagtgtgggagaggagaaaatcacacaagggcatgaataccagaagacaaggaccatggcaggtcatctcggaggcttgctaacacaccctatcaccctcctttgttcaaatcttgcaaaacctcagccctgagaaatctaaagcatggcgctaacatctaacccattgaaaagcataccaacatgctgagtgaactcattttaagttcatgaccacagacatcaaatgaaaccttagtgctgtctgactatccttctacatgcctctaggcaatttattcttttcctagggtgactttcccatatcttcatctcttttatacctggtctcattcttggccaaagtaaaatagaagctatcagaagaacaattctacatacttccaccaacaaattaccaacccagctatacccatatactctaccttctcacctgtcactacagatggtcagcttttgcttctatgtatgtgttttaatgtattagtccattttcacactgctgataaagacatacctgagactgggaagagaaagaggttcaatggacccagcagttccacatggctggggaggcctcacaatcatggcggaaggcaatgaggagcaagtcacatcttatgtggatggcagcaggcaaagagagagagcttgtgcggggaaactcccgtttttaaaaccatcagatctcatgagacttattcactattgcaggaatagcacgagaaagacctgcccccataattcaattacttcccactggtttcctcccacaacatggaggaattgtgggagttataattcaaggtgagatttgggtggggacatagtcaaatcatatcaattactttcatggggctgccataactaaatactgcaaactggatggcttagatcaacataaatgtactgtttcccagttctggagggtacaagtctaaaatcaaggtgtcagtagggctatactccctctaaacacgctagggcaggatctgttcaggtcttttttctgttttttggtggcttaggcattaactgtcttgcaaatggccatcttctccctgtgctcatcccatagtcttccctgtatgtgcgtctgtcctggtatccagatttctccttttataaggactctgatcgtattggattaggacttaccccagtgacctccttttaacttgattacatctgtaaagtctgtatttccagataaggtcacattctgtgggactggaggttaagacctcaacattttttgtaagggggaaggtagatgggggacacaattcaacccaaaagcttagactaatttcccatttgtatgctgaatcccattcctttccaccagccaaatggatctttcggcaattgtacctgtttccccctgcattatctatttttccctttctattgatcattcccatcatatagaagcaggatctaataacccccatcataaaagctaaccaaccaatcaaagaaacaaaaaacttgctgatcccacttatcttatttacagaactcaaaagaattgtctttactctatggctctactccttcccctttgctttctctgaagctcacttcaataaggctttaacctaccatgccatcaacatctctttggttatggccaaaagcactctatatattatcaaattcaatgggcagctctcaagtcttgtcttacttgacctgtcaactgtgtcatttgacacagtaggccactccttcctttttgaacccatttcttcacttaatttgaggacagcactctcttttgcttcatctcccatctcactggccattgcttctcagggtttagtctttgaaactcgtctctagatgctccatgccttgagtgatgtcacccagccttgcggctgtataccatccatatctacatacactaacaattcctgacctctttctttaatgccaggcttgtatattatgttaatccttcctctctactcaaatgcctgatagacttctcaatattttatgccctaaactgacctcatgatgatccttcgtgcatatcctagttcttttcttgtcttccctgtctcagaaaatggcaaattcatgatcctagttgcttaagctaaacccttggcatcatccttaattatctgtctctttttctcatgtctcacatacaagtatcaatgaatcctctttgctctacttccccaatacatcccaaattcaggcatctatcaccatcttcatcattgtcaatctggagcaagccttgattcaccttcgcctggactattataatcatcccccagttagtttccctatctctattcttgcccacctctagtccattccggacccagcaaccagaacatgtaactcaaaatccaccaatagcttcccttcttgataagcataaaatgccagctcatttcgttggccttcaaagctccccatgagtgcattcttggccacctctgacagaatcctgtaccacttattcctgtattccctccactccagtcacgcgagcatcctggttccttttttaccctgccaactgtgctttctgcctcatggcctttgcattcactgttcctttaatgaggaatgcccttcttttaggtatccacatggtttgctccctcatttcatccaggtttctgcccaaatgtctccttgtcagagaggactttcctgcccactctagctaaaatagcaatccctgtccaccaatattctccatttccttacccactttctatttcttcataacgcttatcacggctaggaacattttatatttatttgtttttttcccttacctctttaaagtataaacttcaagagagccacgactttgtttactgatgaacacttccttagctcctagcatggtatacagcacatagtaagtgttgagcaaatatttctttgtcagttaatgtgttaactccctgtttctctctccttctttctcttccattttcattctcttccttcctatccatttttactttttctctttctttttcttcacattccacttccatcttcatttttgcttcattttcagtttaatatcagaaaaacagattgattcaaagactttcaaaaggagaaaattcaatgtaatccttaaaattgttatgaaaattgttataaaaatcaaagcagaaccacccataatttggtggttaattttcaaaataaaaagcagctgaaattttagggctaattgcaaaaatgaataactagattaatccatccctgcattgttttaacctgagtttctaagacactgacttttcaaataagctaatataaaagaggggctccaaaaatttacccatacctatgacagaaagtagcttgcctttctgtgtattatttatgctacatggattaaaaattttataataaacttcttagtaaagaaagaaaatatctcatttttcctctacacttttgacttcttcttcttttttttttttttaaaaaaaattcccatctgctttaatgtttttctttggttaatattttgggatttgttcaacaaacttacttcttaataatgcttgattaagccttgtttgcaaaatcaaatatctacagatgtgggcaagaaacacaatcaagtaggctcagggtaaaaaaaaatgtctacagtttaggggcctgtgacaaactggagacacatgctttgtgtaaagggaatactatgaaagtcaaaacaaatatgggtgcagtacaaatttagctggtagttttttgacctctgacttaggtgactattataataatctggtagctgctagtccttatattcctagtagctaactgtgggaggaagtgcatggtatcgaagttacaaaacaaatattagagtagggaaaatcaaacttctatgaaaaataagtcagcaagtgaatacgtaaaattgagtgggtatgtatgtgtatgtgtgtgtgcatcttcaaaataatagtcaattattatgcagtgatgtactgtggctctctggaaacataagaaccacatacaaaatataatgggatgaatcacaaagtcggttgcaggtagacatatgcttgggtacaattatttttagggtattttctgcaaataatggaagttaaaaggagaaatctaatcaaaaccagaatcagcttccagacagccaacccatctcagatgtgagaactttttgttagctggttataccatgccttccactccgtggtgagatgatgaagatgcccctgggtgaactgcaccctggttttcttccgtttcgtatacttcgttcttgctttgtgcatacctgaaatccatgcagactggaacgcactgtgcacagttgtgtggtgactgacgcctgaccgcttcatcatgtgtcttagttcatctgggctgctgtaacaaaacgccttagattaggtcatttgtatataaccaagatttattgcttatagcttaggagtctggggagtccaagatcaaggcaccaacaaatccagtgtccgctgagagcttgttccctgcttcaaagatgccctcacatagtgacgggggcaagggagcccccttgggcttccttccataagggcactaatcccattcatgaggggttatgactcatgactgaatcacttcccaaaagtcccatctattaacactgtcacattgggtattaggctccaacatatgaattttgggggaaaccaacattgagaccacagcgccatggagctgtgctaagtgagagagcggttcctgtatgcgggggttttcgttaatgcagtaccatttaaagtgaggattgcttgtatcagtaaatcaagacagcttgtttttccatacctttgaactcaaacttacctaatgtttgctactttgatgtttgtttgtttgttttcagatactcatttagggacataaatcatcatagttgtaagcccgtgctccagggtcaaaaagaatattgggttcaaagaccaggtctgcctcttattgcctctgtgacctgtgagacgtttcttaacctctctaagcctctgtctcctcatctcaaaaatggagataatcatacctcacagctttgattaatgtgaagattaaagtgagatgctgcttataaaaaacttagccataataggtagcataacaattctcagtatatattatcaatgactccctttgctattactccttttattagtaatacagagcacagctactccttgaagtgtttcataaagtttggtgacactcttaacactcctgagaggtcaagcatacaattggcttaggttggaggaacagtgaacttggtggtcttgttgagccctggtcatgcataactaggatgccagatgcttcgacctgtaataaaaaattccccttgagcttggtagaatttggcaggctcaccgttcatccttacatgagccgtgtgagtcaagcactgggccagctcggcagaggcatcgaagttcaatcacagcgcaaaatctaatcaattctcacagtcaatgaatgaactgatgattcaggtatttatagcaaaaggtgtgaagagattatttggaacatggtggagggtaagaaacaggtataaatctattccagaatttcatttcttgtgagtcttctaggaaatgagatgaatgaacttttaaagaacattcattattcagctgagatttttgagcatctactatgtgccgggcattaggctagcttctagcaaaggagctgagaacaagactatgtgagcaccagctctcacagtgttcaaaatttatgtcaacatctatgctgagtgtgtagcccttattactcagcttggcactttacctttctctaagttgtcagaaactactagaaatttgaacggtttccatcaatgtattcaaatgaattgctttagtggtgggcagaggaaagatcctgttttttcctcccctaacacgcacatcccattaatcaacagattccttgttatttaataataaataaaaatacattaacttgttgaggcaaacatgtttcccaaagccattattaaaactgaattaccaacaacatggtttgaacagtaatatcatgaccacaagtcatttttctcagttgactttctgactggtgatacaaaatccatgggaactgtctgaattgcgaggcaaatattttagtaatgagtcgatccccaaaacaatttcaacactggaatggaaatttatacattccttaagctttgcttcaaagacaggtaaaattccttctgaattgggtaaatggaatgcattctataaactgtacccttttgttacaatgaacccaattgctcccgtcgttcataatctggcccagcaagccaattctttgttccattgctaatccatagtgcagattttaatctccaacaattagtaacccattcctacatatcttggaaagttcatgactgtcagggtaggcaatttttacgttgtgtatataggtctccaaagagacaatacatgtttgtggaatgaatacatgcttttaaaattcccatttcaataagtggagtttgcaggatactttaacatagcccagctgagaaaaattttagtgaaagaggaatctagaatagtagtttccaactgagggtgatatcatcccccaggggacatctgacaatgtttggtgtcatcttcggtagtcacatctgaaagagggtgctattggaatctagtaggtagaggccagggatgctgtgaaatattctacagtgcacaggacagctttcctacgatgaaaaattatctggccctaaatgccactagtgctgaggttaagacaccctgatctggagggaatgcttctctttctttcatctctctcactggggaagtcagctgtgttgtgagtaagctccagcagccctatggagaggtccatgtggtgaggaactaaggctccctgaacagcagtcagcaacttgtctgtcacctaagtgaggcatcttgcaagggcattttccagcctcggttgagctttcagatgaaagcggctcacgcagacacctagatggcaacctcatgagagattcccagccagaactagccagctaagccacacccaaattcctggccctcagaagttgtagaccagtggtccccaacctttttggcaccagggactcgtttcatagaagacaatttttccacaaatggtggggtggtgggggatggttttagaatgaaactgttcacttcagatcatcaggcattagttaggttctcatgaggagcaacaaccgagatccctcacatgtggagttcacaatagggtccacactcccatgagaatctaatgctgccccgatctgacaggaggcggcactcaggtggtgatgctcgcttgcctgcagctcatctcctgccatgtggccggttccttacaggccacagactggtactggtctgtgccctgggggttggtgacccctgttgtatgtgatacattcttctaagtcataaagtcgttagtaatttcttacgtagcagcagaaaactaatataagtaccttacgttgtatctacaccgaatggcttcattttattttcctgtattccggtgagtacaagaagaatggtgaaggatatgctttttgattttgtggagaaatgaagacttgcagaataaagcatcttgcttagttaatagagtcacaagccatttgatggagtacctgttgagagtatagcctaaggaagccttgactttgaagcccaaatctgccactttctagccaagtaacatctctaagcattgatttttaaaatatgggaacaacaggagcacctgtttgatacggttgctatggaaattacaagagataacaatgtaatgtgcttagcacaatgagtggctgatggtaaacgctctacaaatgttcattgaagaaatagttgttatgattacatgagtgagtgagttttttttttttcaactcaaatcactctgtttttctgtttcacatctttgccatttaaaggtttgggaatgagtctcaaagcccatgatttgtgatcttctggcattttgctgaggttgggattagaattatttaagttgcaaggtggcgtttggtggaactcagcgatctcccagctgcctgtgcagctgtctcaccagagccagtgaggcactcattctgggggcaaaatttagcagagtgccaaaaatctcagtactgttagggtaaatatttttatataatattttaaaaatccaattggcaaatgatggctaaccacctgtttttgtaaatgaagttttattggcagttcactactcacagctgtgaattcaataattcacatcacgctttttaagatgattattttcttaaatttatttttcgtttatatttacagtgaaatttttgcccttaagcaatattcatgtgtgcaagcaattgtgaggttaatggcacttatcccctggaatgggtctgtatgaatttggaagctgtggcaacatgttgcagacagcttatcatgaacagttgtggctggaactgataatgtcttctctcattgccaggctcttgatccttcctaattcatatgatttgcatccataattttggaactaaaaatatgtcttttaaacaagtaatatataaagagaaatgttccaaatcctatttatattttaatttattattttttatttccataggtttttggggaacaggtggtatttggttacatgagtaagttctttaatggtgattttggtgtacccatcacccaagccctacttttaattctaaggtgatagagatccaggattaaaaagaaggataaacaaaaagaaaatagaagtaaaaaaaaatagaaatcaaagcatcaactaatgatatggaaaaagaaaagccaaacctttgttctttgaaaaaactaaaaacaggcttttgttgagatacagacagcaaaaaaaaaatcctaagaataaagcaaaaacttctacaattatagatgttttaaaaaatcgtaagtgaatacagttagcaactatgtgccaataggtttataagtctaagtgagattgagaattttctagaaaaaaatgtaaattacttacactgacacagaaagtagaagaaaatctaaataaaccagtaaccatgaaggaactgaagtggtggcaaacatctgcaggcctgtgccagcgctggctccatcggtggggacctgagctgggtagtcacatggcggccccatgcttagaagtaccttgctcagggtttaattctttgctggctttgggtttaattctttgctgctactatcttaaaattctttttctctttctttcttttttttttttttagacaaggtctcactcttcccacaggctagagtccggtgacatgatcacagctcactgtagcctcaaactcctgggctcaagtgtcacagctcactgtagcctcaaactcctgggctcaagtgatcctcctacctcagtctccctagtagttgcgaccacaggtgtgcaccaccacacttggctaattttttttttgaagtttttgtagagatgaagtcttgccatgttgcccagggtggtctggaattcctgggctaaggtgatcctccagcctcagcctcccaaagtgctgagattacaagtgtgagccaccacacctggccttaaaattattagtttgttatattaccatatataaattataatatatgttacattatcaactgttaattatattatgaaaatatagtaacatattattaactaatatattaatatatattatagaattaattatagtatatattaataagaagccctccttttaattttgtgcttggccctgcaaattatgtagccagacctgtacatactggtatacttttataggtgagtttttcaactaattttacagtactgataatctaaaaacttttgaaaataggaaaagaaggcaaattacccagttcagtttagaagatcattgtaacaattccaagatctcttgatgaaagtcattcagaaatttggagataaaatgttatttcattggacctgccaaaatatgaataactgccataatcatttattacctaagaagtttgatattgacccttacagttgagaattgttgtgtcttcaaacgaagttgttttctaattttttgttttttctgtttccagcaaaaagtatgctagaatagcttatcctaaattcattctaggttagttgataagttaactattttaagctcttccggcatttctacactcttaaagtcttaatatgaatttttttccaggtcactcgctagtgaaccttggaaagatttggcaaattgacttaatgtttgtccaaagtcagactcagcttatttttccggaagctctaagttaaaaaaaaaaaaaagatggaattagtgttggaaatcttattaagaatacagtggaagcatacttgttttgttcttttgttctgtttctatatttctgatccagctacgttgtttctctataaggcgggcagatcatttgaggtcaggagttggagaccagcctgggtaacatagcgaaaccccatctctattaaaaatacaaaaattagctgggtgtggtggcaagcacctgtaatcccagctacttgggaggctgaggcaggagaatctcttgtacccgggaggcggaggttgcagtgagccaagatcgtgccactgcactccagcctggctaatagagccagactctgtctcaaaaaaaaaaaaaaaaaaaaaagggggctgccctctgtttcttgccacgagggcctccccaacacaattgcctgcttcatcaaaacagatgactattacaatcctttctcacgtaatcaccaagtgacatctcatcaccttcgacatattctattggttagaatcaagccacaggctccgccacacttaaagggaggaatttacacaaagctttgtttgcctcataaaatatcattcacgtattattttacttagggatcatcttttaaaacttgaacaaattgatttacaagtaaattttgtagtagcaccagaactttagaaataactggtattagcagaagataattgcaaacatacatattaccagcaataaaaattacttgtctgtgtaccttgaaaattcatcctgtgtataacttgtgattatacataagcatccttaataaaatgctgaaaaaaatcaatgtaatacacttaatataatgccaatcacacagtcagcccttaatcaatgtaagttattcttattacagatctattaggttggtgcaaaagcgattgtggtttttgccattacttttgcaccatcctactacaagtttggtctccagaatatattgtatatcggatgaaacacaggctgaacatcccttttccggcacccttggcctattgatcatgatcttctttcctggcatgcttggactcaacttcagaatgtttcttgatactgtgtttcaggcaactgccaccaatcaattggtgttggcacaatccagaggaccgctaccggtctccagtagatttcacctggtgtagagagatctgggccaatcataacagaaaaaaagcattaacaatacataaaatgaagggggaaaattgatctattaaaaagaaaacaaatgcagatgaaaaagcaaagcatttctttttcaagtatgtcatcaactctcaacttcatatttattttgtcttcctgatctcttttctcccacaatatgggacatcctcatcactttacctttctgctcaatgtgtgcaaaatatattgcacacccagttttatgaaagcacaacagattcgggaggagaaagtttcctctgtgcaaatcttctaatcaattctaaagcattggtacttgggagttgatgctacttgagaagctcaggtgcaaggcatcctgatgactaagggttctgcaaatattttattgctgataaaggaggttctagaggacaaaacaatcatggagaagcataagtgatattaatcacttattaggtcaacttccaacccaggagattaggaaaagctcaacaaattaggccaaatcataaaatggcaccttggctttcaaccaacagctttctcctgaatacttgctgatagattcattgactgacccatttaggttctttgagcaccaagaagtgcagggaaatgagcaagaactatgaagtcagacagactggggtttcagtccgagcctgcttgctgcatttccctgagcaagatacttaacttctctaagcctaattgaaaaatgagaagattcccagagatttggcaaggccatgggagaaattgttgggacaggttatagaaaaggactaaaatactcaaaatagattagtggccctaatcagatatttgtgcatttcagctttttagagaaatgcaatgagatgccctaaaaaccaaaggaaaaaaattcatagatttctagaacgtgcaaaatagacgttgaaaatgaggcgtgccaggtgctatcaagagtagaggctgagtcaggactcaatgttggggaccgaagctcaggccctgccccagaaaggattagctccagctgatggctttgtgggctcaggggccacacagaccaggacctctgttttttcacagaagccagaaatatgagatggtgcatctcatcccacaactgttaaatgttagtaaatctttaaatacctgctatttactgagaattcatcatgtaccagacagcttctaagagttttagtgcattgtttccattgattctctcaacaactgtatgaaatatgttttgatcattatttctgtttcataaatgagaaaactcaagcacagagaggtcagaatcacttccccaatgccacacagcagaggagctgggatttaaacccaatctatctgcttccagcactcagttcttttttttttcttgagacagagttttactcttgttgccaggctggagtgcaatggagggatcttggctcactgcaacctctgactcctgggttcaagcaattctcctgcctcagcctcccgagtagctgggattacaggcacacaccaccatgtccagctaatttttttgtatttttagtagagacagggtttcaccatgttggccaggctggtcccgaactctcgacctcaggtgatccacctgctttggcctcccaaattgctgggatttcaggcatgagccactgtgcccggcctgcacccagttcttaaccacctcgatacactgcctatttttcttttcttttctttttttttttgagatggaggcctatttttcttttaaattattttgacataatttcagaaaagttacatgaacagtacaaagaattcccatataccattcacccagattcttcaagcatttgcattttactactttggttttgtccttctttttctctctttctacatacacagacacacagacacacacacacacacacacacacacacacacacacacacacgtcttaactctgaatgctgagcttgcctagaagcagtaacatcccagtagcaacaagcaccaggagccaaaatctcgatttctaaatgttcttttctactgaaacaaattaggacttcttgaagaaacagatgattccacggtggggcaggtaaagtacaagatcagcctggaatattttattgttccagaaagcaggaagtgctcaaaaatggtaacaacatgtcaaaacaaacaaacaaacaaaaaaccagcaacaatgcacaggaacctatttaaagaggctcccattaatcaaatctggggcaatctgaatatcaaaatgaataatgacagtgtaaaaattataacccattcaaaaacataagaatctgcaagctcgcactgacataaatagacataaattataaataattaattcttcctgacagcacgactgtaatctcagcactttgggaggccgatgtgggcagatcacaaggtcgagagatcgagaccatcctggccaacatggtgaaactccctacatagctcaccacaatagcaagtttatatgcatttctgtgattatttgattgacatttcctccccttgttcttccccatcctccgtagtaggatacagatggcgtaagagcagggacatgtttattttggtttgcccctgtacccatgatgcttggcttacagatcttcataggcactcattaaatatttccttttacctggttgtcctagttgtaatgtttacaaccaccatttatggtaaccaataaagctaggcaaatttcccaggactcgtgccaagttgtaaatcctcctctccaaggtcttctagattaccaggtcatacagtgcctgtcacagggtagatgcttagtgactcagggcaattgtgattgtcatcagtaacacacgctgctcagtgctcgtagcttattatgacacctttctggtccctattctgtctccctcaaggctgactccatattttagctttaacaaaatttccagggatatttgtgggaaaccagtacacaataatatatatggaattcagtccagttggcttttgtgatgtccaaataatttttttgagagagaggaagggaaaaataaaaagagagaaaggaaaaaaaaatgaaggaggaaatggagagatcaaaggaattcctcaacgtttgtagcagggattctacagaccaggtactgctcccccggagagtaggaattatttatggggaaattacttacacaggggatggagtgaggttgcattatatgcacacttaacccaggcacatccaaccatccatgcttggagtggaaagatgactatggaaggatgtagcccaggtgattccaacaccctcactcaatgagaacagcaagatgagaaacgagatccacctcttgccttatttctcatgcacatctcaaaatgtgagctcctgatgcccttggtgtggttctagcatctgaggaagtgcatttttcatgtgacatggcccctagacataagccaactactttaggttgttttcacccactagagcagaaagcttttccaacaccggaaggaatcctctgtggattaaaacccatttatgcctagtgttccattagtggaacgctaagcttctgggagttattgaaatcccactgcttaaggtcatcgctaaggtctgatttttcacaaaaaaatttgcaacctctggcataaatgggttaatgagggatgaaactatgtgtttacggtatactttacagataattgaagggatgtaaagtttaccgtaactctaagaaatttttactctggttgactttcaaacctaaatccccagtgcgctttctcgctaatgaaacacctgtgagttccataccccttaaacttcatgctgatatagcaggaaaaatcctagattttattttattttttgatattgaatttcacttttttgcccaggctgaagtgaagtggcatgatctcggctctctgtaacctccgccccccaggttcaagcaattctcctgcctcagcctcccaagtagctgggattataagcacctgccaccatgcccagctaatttttagtacagatggggttttgccatgttggccaggctggtctcgaacccctgacctcaggtgatccatcggcctcggcctcccaaagtgctggaattacaggcatgagccaccgtgcccagccaaaaaacccctagattttaaagttgttaacttcaccaggttttaattctagaggagtcatttcccaactgtgtgacatggggagtttacttaacctctctgagccttagctattcaatggacgttaacatatgcgatgcacaagtgttctcatgaagatcagaaaatttgaaatgtacgtagctcggtgctgagcatagagcagggatggtgtccaaattcttatttcctcaatcagagaggcaaaagtcaaacaactccctttacaggggcagaacctgtcaaaagaaatgtgctgggcccaaatgggaaaaatgagacaattacaccatctgaaaatacaaacacgatcagttttacctacttgtggagcagaacctaagagacttatgggaaattaatttttttttaagtgaaagcaagtttattaggaaagtaaaggaataaagaatagctactccacaggaagaacagtagcatgggctgcttgattgagtagacttgtagttatttcttgatgatatgctaaacaaggggtgggctattcatgagttttccaggaaacaggtgggcaattcccggaactgagggttcctcccccttttagaccatataggggaacttcctgatgttgccatggcatttgtaaactgtcctggcgctggtgggagtgccttttagcatgttaatacaggaaattaatttacttttctgtttagagtcttcttgggactgatggagaatcaccaggacaattacaaaatacagtggactccatcaacccaatggtctaatcatgggaggttttaccctaaatactggaaactacaaatccacagattaaatttgatacatttggtttggttcaaatctagttgccaaatagtgatttttctaatcccatcaattttgtatacttttatttaattaatttattttttgagacagagtcctgctctgtcgccaggctggagtgcagtggcatgatctcggctcactgcaacctccgcctcctgggttcaagcaattctcctgcctcaggagaatctgcctttctcctcccaagtagctgggactacaggcgcgtgccaccacgcccagctaattttttgtatttttagtagagatgagcagtacatgacgtgcatcccacaggtccgggaaccaatctatctttgttggaatcctggcttccctacatactaactgtgattctaaggagattactgagcacctctgtgcctcagtttccccaggtgtgaaatgggaagaatgatcacatctacttacagggcagtgacaaggatttgtgaattcatatgtagcaagtgcacagaggagagactggggcagcaagatcagtcaataaatattattatcatcatgaccacattggccatgtcagtgtcggctccaggcaacctgctcagggaggtgaggggcagcagacgtggcccttgctccaccctgtgctcctcacacccatttgccggtctttgtgcccttcgcccaggtttttcatgctttgctcctcatggctggcacctgcagccttcttcaaagactaccttctggctactatagccattttgcctggacatgtaaagtctagaagtatcttagagtttataccccaaggtgcagcctgaactgaaggagtgtggaagccctgctccctgggcacaaggagaacaaactgagctgcaatgtacactccagagctcccagagatcaggctgaggctggaacttcactcaaaaccacacgcttgtttggcttctttcccttcctcatcctgctgtccccacagtcgcacaggtctccttgggaatcacaaccctaatgaatcccggtgctggggacagcccctgtgggatctaagtcatcaaggaagatttccttcaggaaatgaaagctgggtggacgtagatggtgcgtaggagaagaacaggcagagaaagagcatgccgggagggagacggtgggaagaaccctcttgctagcatttaaggaacagcagaaactggcagaagccactgtggcctggttccagaggcctctgggggtggatgatgtgggctgaggcctgggggatcagtgggacctcagttgatagggcctggaagtgtggattgcagaatcggatctttacgtaagagcaatgggaagccccagaggcaggatgaggcatgatcaggtttgggtttgaaaagaccagtaaggcaagtgtgcaaagaacagaggggaaggaagcaagagaggactgagatcagctgggagctcctgcagagactagagatattagtggtccaggcaagagattgtcagtattgctcccagccacggaaaatttggctgttgtaggtctttcattgtgaaatgtaaacttattcttgggaattaagtattcaaacagtgaatgtggtaggcaggggctgaaatggttcgtaacctctacctgactgccaagtgccagcctccctttcatgtcatgaaagatacaagagagaacaggctcccaggccgttctacccccctttcaatcacacaaccagtgtgtgactgattgtgtgattggaaagggggtagagatagaagtaactggacttgggaaatatttaagcagcaacaaaatggaaagttattttgcaattacaagaataaactttcagtaaaactgctattaaagtctagatttatctaagggtaaattttgtgatatagggcttgtaggccatatgagaaaattttctaccagtaaaataaagtttgaatttgtttttattttgttgtaacaaaggcaataaagaggggaagtctctcaaatatttaaaaacttttatttttactttcagagaatttgaaggtatacagatgaaatctgacaagacgtgaatttataattctaaaaataatttcacagcagagagaaagcatatacctagatatgtacatatttattacaatataaagacataaatgtatatttctgaaatattctaaaaatataatgtaggaagaaatatttatcaaatacacagaattatatacagtatgcatttaggaaaagcagtagtaaaaatatgcacaaataaaccatctgtaaacacaatttttaagtcttataagtattgcatgcatttctgtgcattttacatttatgaaatcatatttttcctaggagttcaaatcacaaaacaaatgttatataacagatctctaacttttgcatgctttacacttgtcccatttaatagacagaaaaattatggcatgggaaatcattttataatattaaagtcacactgaatgtttttaagctgtgactaaactttgaaacattgccctgcaccacagatcctaaatcaagtactgcaaatattaaaaaaatgactgaggcaaattaccattagaacccacacacacatacacggacacacacacacagacacacacacacatgcatgtctgtgcttcatatgcacatacacaatttaaaaattattgcttcatctttaccctaatgccataaaggaatcacatttaaaaaataaacaattttaaggtcctctaacaaaataatgccccagtgaatcactagtcttataagttgtttgacttcgttaaagtccttttaaaaatagaggtgttctctagtttcccaataatgtttttatttcaatgcaggaagaacgcaatttcatgggaggcctgataactttaaccatcatttagcttggcttacattattaagcagggacattttcctaagtagtacattaagcagagctacagtaaatggattgtcagtattactcccagccccagaaaatttagctgttgtaggtcattcattgtgaaatgtaaacttattcttgggaattaaagattcaaacagtgaatgtggtaggcagggcctgaaacggtttgtaacctctacctgactgacaagtgccagcctccctttcatgtcatggaagatgcaagacagaacaggctcccaggccattctaagcacctgaagatggtgctgacacaggtgaagtgtaaaccagcagtgaaccctgtagaatgccttggatcccagcactcagtccgcttccctgagttggatatgatgttagcaaataccaccatctagaaagacagtacagcttctggaacaattttgcagaagaaaaagtatcaacacctgggcctaaatattctttataagctgttgtatggtgtggtgtttgaagtttgctttccggtaacgtagaagccataagcaccattcttgcagaaaagttgaaatggctgttttggtcttggtaaaaaaaaaaaaaaaaaaaaaaaaaaaaaaaaaaaaaaaaaaaaggtataccctaattgtatatcaaagaagtgtatttaaacaagacaaattattagccaaagaaaaaatgctaaaacttaaaaggtgtggcttactgtgataaacatgcatgctctttgctgaaggctggggtgtcacaatgcagctagaatactttccttaccctacttgattcagttctgttggttgggatgctcagaatttgacaaatttcataatagcatcagacacttggtggaggaataataatgtattcatttgggccttgttcagaaatttcatctgtaattgcatgtttctctaaataatctaccaataagcaaatgctccttaacttgccattggcaaacagcatttttttctaggaaaatcctagaaggtgctgctaaaagaacacaatgatagaatccgggtttaaacaccgacatgtcagcctataaagccatatgttacaaatgtcttatttccaccaccaggggtggtggctcacacttgcaatcccagcactttgggaggccgaggcgggtggatcacgaggtcaggagttcaagaccagtctggccaacataatgaaaccccatctctactaaaaatacaaaaaattagctgggtgtggtggtgtgcacctgcctgtaatcccagctactcgggaggctgaggcagaagaatcgcatgaacccaggaggcggaggttgcagtgagctgagattgcaccattgcactccagcccaggtgacagtgtgagacactgtctcaaaaaaaaaaaaaaaaaaaaaaattagggccttcttaggctaacttttgatcacttcaatagttttgaattcattgtaatgtctattaggagaacataactagacttactaactcttaatttcattaaggaaattattactcaggacgaggccaacatatgctatttggcttatgttatttaaaggaaataactcagtagtattgaaataaatagcacctggttggtatatggacatggcaaaagttgtggagggaacatgagaactcctctattgtcagaaaaagtattgaatggcatactgcagaaaaaatattctattgtgttcaatacaggctgataaatatatacatttatattacatgtggttgcataacacaaacctagaccctagggctaaatacagtccaccgcttgttttttataaaatttatcagaacacagcctttgtaggcagaataacagatctcctaaaatgtgaatgccctaatccctggaacacgtgaatatactaccttatatgaaaaaaagggctttccagatgaaattaaatttatgaacttggagatgggagacatgatcctggataatatcttgtcagacagaagcaatgtaagaagaaagagagattcaaagtgtgagagggactcaaccaaccattgttactggctttcagttggggaaggtttcatgagccaaggaatatgggaaatctctcaaagttgaggatcgccttcagctgacagcagcaaaaaaataaagacttcagtcctgtaaccatgaagaactaaattctgccaacaaccaaactagcaagagaatagatcctcctctagaacctccagaaagagccccgacaacacgataattttagcctggaagagcctcatcagacttctgacctatagaactgtaagataatagatgtgtgtcgtgtaactcactaagttttagtaatttgcggtggcagcaatagaaagctaggacatcagctcactcattagtttacaaattgcctgtggctgctttcatgttccaaggtagtattaagaggatgtgacaaagactgtatggtccataaaacctaaaatatttgccaactggccctttacggaaaaagtttgccaacccttactattcacatgcaaaaaccatgaacagctgctagcatttactgaacacttaattgatgccaggctcaggaataactacttggtattcatattaaatttttgtgatacactctctttgggtcatcattttacaaatgaaaaaaaaaaaggaagtagagagtttagggaactgctcaaggtcacccagcaagttagaggtgagctgggattcaaaccccagtctggctgacttcccagcatagctcatccctcgtcattctcactaccttgcagaggataatgaaccgcctagatgctcacctgaggcgtattatcgctggcaaaacgcgatggggagttcccggctgggcaccagggtgcctgagtgtagcatctcaacaggctcattgtctgtggcctggatgtcgtatttgcggacaatctgtaatgcacacgcacacaaaaacagaattacccctctcttcttctgccttgtgaaacagcacagaacataattgcagaaaccggtaaaggttttacccaacaaagagccaaatgcagttgaagctctgctaatcggcgaccaatgcacattctttttccaacgccaaatggaagatgcgcaaaaggattaattttttccttctcctgaagccaacgttcaggtctaaactgacttgaatcttcaaaattgtcttcactggatcccaacacctgggtatttagcatgagcactgtctaaacacatgcagagacacatagtatttaaaataaccagaagagacctttgaatggcaaaattgacacaagttgtcaccttacaaatcaaaagccaaatccacaaatttataataatgatggttgccaacatgcgctgagtgcttaaaatgtgccaggtaataaataggtaaagggctttagaattgtgcaccatactcacaaccaccctgcgcagcagattctgttattaaaccccttttacagacgaagttgaggctcacagagattatgtaactcactcaagacaacacagataaaagatgaaactgaatgcaggtctctgtctccatagccgtgaattctaattctatactatgcaacatgtcaactattctctaccatctctgcattcccaaaatgaatattttccagtacaaagtctagggagatctggtgaatatttgcaaagtgtatcttccaaggttttgtaaggtatagaatatacaaattctacttactcctttgggtaaagcatattcacccagaactgttgccttgtcaagagtccgagttgtaaatggtacactcggcgtaagcctgaaaagataaaatcaaagatgtaaaggtgagcacagtctaagttctctctgaagtgtcaatgggaatgcagattggattaaataaatgctgcccaagtgcatactcaaagaggcagcatgatcacagatcttcctaaagaagttgtttttttcttctcaataattgtatctcttgttcctctcatcttcttgagttagttaaaaccccagtgcaaggctgtttagtaaactgttaacgttggttttcccccttcattccagactaaaatgtgtatgtttccgtgctagcccttgaagcgtgatgtttgttctatgtttctccaatctactcttcacaaagttgacagtatccttctaatcctaaaatgttgtgagttttgttttcccaaaaggatgtaaaaagaatttccaaaaaatgttttataccagaggctcaaaagcaaagctttctctgtgtcctattatataataatatagctcttttgtgagcctccatctcataaccttcaatcatgcccctatcttaattagtgcttacagcgttcattagagtagcaagattattgaattaaaggggagggcactggctttccaagatttaatagaatttgcccaaatgatttaggaaatgagtgccagaaaagaaatatggctccaaagatttttttgcagtgtgataattgtttctaattagctaggggaagccgcccatgagtaggggaccacttgttttgtgtttacgagaacagtgttctaacacatttatattggctcagagataggctcttacctcatagattctttcagacaggcttttaaatacggcatattcctcaaatcttctgcccgtggcacctgattctcaggtaatacactttgaatttccttaagaagcttttgttgcacttggggattacgggataaattgtagagaatccacattagactgtttgctgtctgcaagccaaatggacataaacttgagtttttgtaaataactgcattaaaccactattagctgaaaaaaaggtgatgcccaccaccttattctgcaaatgtatcagtgaagctctttcacgcgtccttatagctacgcctttagacaaatccaatatataaaaaagcagacttatttcataaaacatatcaattaaggatatattttaaattatttactgagggaatcaaagtataatcctttaatcagctgctttagaacatttaaatacagtttttttttttttttgagatggagtctcactctgtcacccagactggagtgcagtggcactatctcggctcactgcaacctccacctcctgggttcaagcgattctcctgcctcagcctcctgagtagctgggactacaggcatccaccaccatgcctggctaatttttgtatttttagtagagatggggtttcaccatgttggctaggctggtcttagactcttgacctcaggtgatctgcctgcctccaaaagtgctgggattacaggcatgagccaactgtgcctgacctaaaatacagtttgacgcaataattgttcgaacacaaatgagtacatgtaaaattggtgaaatgagaatattagtgggttaaatcaatgccaattttcagattgtgacaacgttttctcgttagacaggacattactattagtggaaaactgggtaacggatgcaagggatccctttctattttttcttagaactgaatgtgaatctacaatgatctcaaaataaacatttaattaaaagttgcttgatataaaaaacattcatataaaaatggagtaaacagagagggatggtgatcctcagggtgttgctaatgagaggctttaagagaatgttatagtggaaatggacaataaatggcatttctgaaatttaaaagttcctttggccacaccctaaaaagtcaccacaaaaataaacaggcactacctacactgagggttacaaccacatgtaaacagccctcatacgagggtgccaacaccaaaaataagaaattcaaacattgagctgagtactccagctacagtttctgacaaaggcccacacccttttaagtggcatcttttatttcctctgcacaggcaatgactagagaaaaaatattggtggaaacagccaatgtagctttaagctacataatattcaccactagtagtcatatgtatttattttttaggccgtactttgctaatttaagccaaatatttcctgaaaatgatcattgtgtccacctccgcagacatgaagacgctgttgctaagtgccatgtgccactcacacaaatgagcaccaagtgcaagaccattcagagatgatggttattttattatttttggaagaagatgcctccaaggcagtcttcttcatgtcagaggactggcagcctcggctgcaaataaactgtagatgccattattataagagtctaatttacaaaacaggaagagggtgtagccatcaaattagatacactttcaaatggttctgattttccaaatgtgactttcagaatagccaggaccaaaaaagaaacagatttaaccatatcagtgagtccctcaccgcaagtaccaaatagagtttccaaagggcagatgactgtagcttttaccaaagccacgtaaggcagtctgagcctgtagggaaaactgcaggggctaagctgcagcagctgatttgaggggaagtggcctggaaaacctcaggggcacaaactatccttgattgacctccatggaacagaccaagctcattgactggcctgctgtacccactctcttggctaagtctattctccatccaccagccagagcccacttttaaaaacataaatgatcaggtgattcccttgcttaaaatgctgcaagagcttcccatcacaggtgcaatcaaatctaatgccttacccaggctgggctcacaaggctctggctaacatggcccatccaattctccagtctcagctctgaccacatttactagttctgtagctccatccctctttctgccccagggcctttgcatgggccgtttcctctacctgcagcgctcttccacgaggtctttctgtggctggctcttctcattattccagagtcagctccagtactgctttctcagagagggcttccctttaatcatctccatctctctatattacaccatcctgatggcgtcctccacaatccacaccactatctaaagtgaccacatttgtttgtttacatggctactgtctgtcttccccacttgcatacaagttccatgagagtgggaacccttgtctctggttcatggtggtctctcaagaacctggaacagtcccaggcatacagtaggcactcaatagttcctgaattccttcatttattcaacaagtatctatcagccgctactagatgccaagtactgttctatgtcctggaaacacagcagtggacaactctaagccattgccctcagagaggtcacgttccagttgaaaaaataaaagaataatgggtgacactgtactttgatcactggaaggagccacccagggtaagcagttcaacaggaaagtgagcgaggatggattcccactttcaaccgccttgtggagcaggaggagaaatgagaacctcgctatctcctgatagagaaaaccctacctttacttcaggcaagaaacagcacagaaggggaagcacatggaaaataaacaactgctttacattttgcttagagactttaaggtgcatgaaatgttggacttaggaggaggttagcgtgcgccactcccatcacagctcgaactagtatccaagtcaattaaacctacctgaatgcctatggcaggatttgtttggggttggtctcacttagtatctgctatctcctagggagtatcggccacatcagagacagaattttggtctttacaatgagctgttttgcttcagttaaaatccacttgtcccagactctttgggactttgtttacaattctaagcagataaaaatattattggcttgaaagagagtatgccttttttttttttttttttttttttttttttttttacagtaagtaacagccacagttaggcactttggggtaacatgtgcaactgaacaaaatacttccaattttgaaaaatctggattctgtatcttgccagggcagagaactttactgctcctgaactcccgtagcagtttgcatggacatcatggcactcatcacatcctactctggctttttgtcactggggcacatgaagtctcctcctacccagagtttaagcacagaagcccgtgcatggaggcaccgtggcgtctggtatgaggccgtgcgctgaggcaccgtggcatagatgctgtgcgcggaggcaccgtggcatctagtatgagacttttcatttttgtggagttgatgctagtgaatcccagtgaaatgaatgagatgaattactatttaaaatctgtcatctaaaaatggtacagaccgttcatttagcaaactcaaatccagcccacccttaccgtttccaccgcagccagctggagctctgtgacagcagcatacaattctttctttgaaagccgattctggtgataaatgtcacaaaggaaatctgcactaggctgctgagaatacttctctaaccggttgtcgatacaagctttgactattagagcagagaagaaagagaggaagtcagctgaaaattgggatgaggaaaatcacagaagaaaacctcagtccaaactccttcttgcaatatctaaatagtcttttcaggaacactgacaatttgctacacacactaattatattattgccttcttgtcaagtcggcaaggatttttcaataccgacatgagcaaggcttctcaaactttaatgtggataggagtcacctaggcatcttctcaaaatgcagaatctgaatcagggcttgggtaggcctggaactctgcattcctaataagcttctaggtgatgctgatgccactgggctgcaggtcatagttttgagtagtaagagtttagatcttgggagaaaaaagtgtaaaagaaggtaggatttgggttcactttcagaatccaacttggacccagatattactaagcacacataccccacatacatacgcacaagtagagtgtccatccatgttgacaataatggtaaaaatttctaatatttataacataaaatctaggcgtgtacctccctcactattaagcaaacaaccaccaggctcattatatggtaataatcatgctgatcacatatggcacagcagttagagttcgagtcctggaagctccttgtctggcttcaaaccttggctttgccatcacctagcatgcaatcttgggaacgttggctaacttctatgtgtctcaggtacccctctcagggctaataaaaggacctaccttataggtgtgttgtgaggattaactaaatgtgtaagtgaacaatgcctagcatcaaatattccccttcgtcatgtggcagaaatagatctagtccacggagatactgtgatatgccaggtttttatgttaactgtaatctgtagtagacccagaaacagttacattgaggtaggttctcttattattattattaattattagtccattttagagacaaggcaactgaggatgaaaaggtgattgcacatttggccaagccaccacaaccagtgacagagctgaacttgaactcaggagtccctgactctataaattttacttttttattttgagatggagtctcactctgcctcccaagatggagtgcagtggctcagtcttggctcactgcaacctccgcctcccaggttcaagcaattctcctgcctcagcctcctgagtagctgggattacaggtgcccaccaccacgcccagctaatttttgtatttgtagtagagactgggtttcaccgtgttgaccgggctgatctcaaactcctggcctcaagtgatctgctcgcctgggccacccaaagtgctgggattacaggggtgagccactgcacctggccagattttacttttaaccactcttaattcccaaagaagactacagaaagcttgttacttagaatttgtgtatgctggggcaatccccaaaacacctgtgtttgcaaaacctaaatgtggtgatgaggctcaggagatcactccagacctcctctctgaagctccagacacgggggtgctgggctggttctggctggttgtgaagggcggccctttacctgatttgaaaatggtgtcccaggccagagtgtggtcctgccagaccttggtgttgaggctcttgtgcagctcgactggagtgaccatcatcctcccaaacgtgctcatcatctgagagaaatgcaaatgcctttttattctgaattctccttctctcaaagacaatgttcgttctggaagaggaacattctaaaccgcagcaccctgcactttttaaaaggctggaattacaaggacacccccggctctctctgcaccggtcctgggagcaatgcccgtaccccacctccacctcctttcaatattgaaggtaatgtgggggatgattttccactggatgtgtttgataaaaattgtaatcttatgacctaattgtaaaaaaaaaaaaaaaaagaggaaaaacgataactttcatattcacttcaatttctaataatttccaaacttcagtgatttccaaaccaatttcacagcgtttatcctatctacacgccacccaaactattcaaaaagataaaatctgaaaaattttgggctctttttaaaaagtatttttaatcaactgatctttaattaaaatagctattttaaccttgcctaaacaaagaaataatggatttaatgtgcttctttatgttacgtgcatatatccaggggtccccaacccccaggccgtgaaccagtactggtcagtggcctgttaggaacggggccgcgcagcaggaggtgatcagcgggccagcaggtgttaccacctgagctctgcctcctctcagatcaatggctgcattagattcttacaggagtgtgaaccctattgtgaattgcctatgcgaggaatctatgttccacactccttatgagaatctaatgcctgatgatctgtcactgtctcccatcacccccagatgggactttcgtgttgcacgaaaacaagctcagggctcccactgattctacattatggtgagtatataataataacagaaataaagtgcacagtaaacgtaatgcacttaaatgatcctccctcccctgccccaccaccctgccctgtccatggaaaaattgtcttccacgaaactggtccctggtgccaaaaaggttggagacagccgcatatatgcacataaatatactaaaatatataatgcacattaaaatgaacacttaactattgaaataaaatatgtgtgtatgccattttttgggaatcactgtgaagttctgtaaaaatcgatctgtaaaacatcaatcaagaaaactgctttcttaaagaggctgcttactgttttgatggccatgatgaagttcacagcttcatcccctgcattcttctggagaagcccaaatctcttctcatacaacacgaggcagatacctgtcatttaaaataatcatcactttacacaaacagcaatgctggagttggagtctatgtttagctggttattaaagactcaattctatgcctcttaaaagtgtgggattttctgagaaaaggcaacagtccaagaatattgaggaaaagcagagtctgagagaaaggggacaccatcactttctttttctagaaattatctccaggtccaatgactcatcacctcagagtgtcatgatcagagatccactgtcctgatcaagtcacacaggagatccaggggccctagcaaaggtgctgcagggtcgggtctgcactctgcctctaacccagctgtgtttttagagtcacttattggattctatctcctgacataatgaattggaagccattcaccagaggaagagaagggaagggaataattatgttctaaacacccattacacgccaggtactgggctagcacttcatatagggttttttttccttccatttcatcattttatttagaaggaacctttttacaaataaaattctcaactcttcatttcaaaactttttacctagagaaaagttgaaggaatggtaaaatgaatacctgaatcccccgaactcatcaacatcttgctgccatttctttctctttgtgtgtatgtatgcatacaagtgtatacgtggttgtgtgtgctgaagcatctgaaaataattttgagctctcaggtcacttcaccgttaaatactttagcagtaatgtcctaagaataaagcattctccaacataaccacaatgtcattaacatccctaagaaccttagcgaccattccataaaaaatctactgtgtcccattttaaaatgttccccattgtcctaaaaattatctcttgtaaccttttttttttaaaaaaaggacacagggccgagcgtggtggttcacacctgtaatcccaacacttcaggaggctcgggcaggcagactgcttgagcccaggagttcgagaatagcctgggcaacatggcaaaacgctgtctctacaaaaaaataaaaataaaaaaattattcaggcatggctacatgtgcctgtagttccagctactctggaggctgaggtgggaagatctcttgggcccaggaggccgaggttgcagtgggccgagatcataccactggccactgcaccctagcctgagtgacacagtctggaaaaaaaaaattatacaggattactgcaaccaactttttagtggtggataattggctcttgacttataaagtaggagactagcattaaaaaggtaaacaaatggcctaaaatcataaacctgaggagtgagagtcaattagcttagtcagcacccacccacagcttttccaactacctccatgttttccaaactctacttatttcttcccagcctttcaaggtttccccgtatttgtgttccacagtggttggcaggtacaccactgggaatatgtgagatagctctggatggtacatgaactttaaaaataattagttactctgctgggcacaatggctcatgcttgtaatcccagcactctcagaggtggaggtgggagcatcatctgaggtcaggagtttgagaccaaccggtggcaaaaccccatctctacttaaaaaacacaaaagttagtcaggcgtggtatcgcacgcctgcaataccagcactttgggaggctgaggtaagtggatcacctgaggtcagcagttcgagaccagcctgggcaacatggtgaaaccccatctgtactaaaaaacacaaaaatcagccaggcatggtggtgtgcacctgtagtcccagctgctcaggatgctgaggcaggagaatcgcttgaacccaggaggtggaggttgcagtgagccgagatcacgccgctgcactccagcctggggcagagtgagagtctgtctcaaataagtaattaaaaaaagttacttatatttatctatttatggcaatatttctgaccttgaatttatggaagtgttataggttttccttctatccctcccatcagcagccacagtgatcctcccagtaaatctgcccatatatcacactgctgctgaatacattcccgcagctcccggttacttacaggctaaaattcaaactcccgctcatacagccctccatgagctggctgctggccctctgccagcctctgttacaggatatgcttgtcattccgcacttcttctgcagggacactctccttcctcccttttcacctggtgaactcctactcaaccatcaggacttagctgaggggcaccatctctgtgaagcgacccctggccatgtccggcttaggtggccctctcagattctcccacagccctgaatgtcctcagccaggcgctgtcccacctgatcacagctgcctgctctcctcttgcacccccatgggcagtgagctctgccctttatttccagagtaatctttgaagaaagcggtcatgtcctccctcccttacttgccccatctgagtcagatgagaggtaaagtcttgccaggacctatgagctgtgccctgttggacacctgccttctttttgacctcatctcctttcacaggctccccttcctcccagcttgttcatcgtgatccactcacaccagcagcttgaagttcctcaaactcggcgctcatgcttccacctcctggcatttgcactttcttctctgctgcctggaacaatcctccacaggtaccctcatgatttgctccttcccttcctttaggacttacctcaaatgtcttcttactaaaaaagacttgcccctctttcattctttcatgttatttctttctctctctctcttttcttctttatttcttttcttttttctttcctttctctttttcttttccttccctccttccttccttccttctctccctccttccttccttccctccctcccttctgccttccctccctccctccctccctccttccttccttccctccctccctcccttcttccttccttccttccttccttccttccttccttccttccttcctttctctgtctctctctctttcttgagacggggtctcacactgtcacccagactgcaatgcagtggtacaatcacggctcactttagcttcagcgtcccggggtcaagcaatcctcccacctcagcctcccaagtagatgggactacaggcatgtgccaccaaccctgactaatttttgtattttttgtagagacaaggttttgctgtgttgcccaagctgttctcagattcctgggctggcctcaagcgatctgcccacctcagcctcccaaagtcctgggattataggcatgtgccaccatgcctgcctttcatgttctttcttaactccctttctcttttcctttactccttggaagagtatattttaaaatgtgtttacttgttgactgtcaccttgtctagcatataagctccccaagggtacaggggttatgcgtttcattcattgtcatatccctagtacctagcacagtgccagacacacagcaagtattcaacaaatgtttgttgtatgactcattaacaatccatagttcaaggcataacttaagcacctaaaagaagcattaaaagggctgctctggcctttccctaggcagcaataatgcctgtttacaaaagagttgtcaaaagagccatgttttatccgcaaaatcacctgcaaaatcagtgagcaagtctgtgacgacaacttactttcaaacgaccatttgttcagttcgctgtacaagtcttcaacgtggcctctttcatcacagagctcatctattctgcccataaaatcggccaagaccttcaaagaaaacaaccgcaaaagacacattttaaagccgttgaaggaaaacaaaactttaaagctcactgagctaacttcaggtcttgctacatcgcatattcactggccataatgttattcatcctgaagtcacactaattatatattctccctgggaacccaccttatcccctaatgacctcgtcctgggttatttcctgagcttttcctgaagccaccctgaagcttaagtttcagcttttgatctaaaaataattctggcaatttaagaaaaggaaaacattttttttttctaatcagaatgggggaataaaaccacaaaggaatcagctaactgtccctgttggcccagcatctcaaggattgtgttgcagcagctatcctgaggtgtgcccttccacatctgggcaagcaaacgtctctttattggttggtggttatgttaagcatgttgaacttggaaccagaagatctaccaattctggacacagctccttccctaagtagtctatgaccttgggatagtcacataagacctttggatgccagtttcataaaccagagttttcaataactaatgcctcacatttaatgaggtccatatggtaccaaacactgtacgaagtgtattggttgatcctctgacaaccaagtagtagtaggtaccgtctctactcatttcccatgtagtagatgagaaagctgaggcttaaagaggccaagtcactcacttatgcacacagagctgataagttgccatcctggaccctgccgtgagctggtgtggccatacagcccacatgtgtggatttagtttgcaagtttaatttgcccgcatagcgcatttaaaagttctttgaatttgttaccattaaaaaaaacaagaggtttcatatgaacatatggatttaccactactagtttaaaaatgtaaataataattatgagacttggtgacatgaggtctgcattctgacatggcattcgtttgctggaactggggctgctgtccctcctgggaggggcatgcactatcacgtttcctgaaatttttactgggtctgccttattattttatattagtcatgtgagccctggaagcttctgagtttgcaatccttcacctatatgatcccatctggggacgcatccagttcaaaataaacatccaaagtgaacagaagtaaaaagagattactttatgcttaaaactccctttgactccgtgctggctaagggataatgtccaaataccttagtataatacaaaaatattgttaagacctatccagtatcatttcagagaaagcctcacatcagctacactaaatgaccgattctctgaacacaccacgtcatttcatgcctccctgttttcagaaggctactctgtctgccttaatgccttcccccactttctctgctttcagactcctcctgcaaaacccagctcaaatatcactacttaagaactttacaatgttatctcatttaattctcacagcaaacccgtggggtgggaactgttactcccattttgtagatggggaaactgaggcttagggaaggtaagtggtatatagccaggtctcatagccagggagtggaaagctggggttcaaatccagggctgtagaataccaaagtccacactctccattgctccctcattgtgatatgactttaaaagagggtggaggagggagaaataagggtttggtggggaggaggctgtaggaaggaatggagagaaagagaagacccccactttgaatcacccgaattgcattcttttttcctttgttctttgtagctgtgacttgaagctccaccaatatccctatgtccccacgagccccaggaaagctggccccagcctgcagacctcattgattttgttgtccagcttcatcacttcccctggtttcattagtttcttttgaaaggcactccggacccgctgccagtcttccccttccctgtgagagaagcaggaatacatttagagcacactgaaaagaaaagaaggagatgcagaaatactccagctgcaacttcaggaaccataaaatcaaacaaacactgagaatcatgccaagaaatagccagagaatattagcatcagaatatttgggataaaatagtgatcatcttttgacaatagtttgacaataggatgaaaaagcacctttcctcctagtcaaagattgcaccaaaaagttgaagtccagataatttgggttcagggattttgaggtgtccttgcagggagtggggctgggaggcctggggacaattcctagcggtaaaagggggcatgtgaacaccccatcaccagcaactcagatctgtttgagggaagaatcttgtcttctttcaactcattggtgtgggcttcatatttacaaaatatctcagatttagaattttgccatcgcctccaaataataacatacagtcagagagtcactggagtaataaaaagccttttgcgatcgtgcacttgtaggcacctgccccatagcagaccatacagcctgtgaagcaccgtgaattaatagggtttttaattccagtcattatatcctggaaaatataacgattaggcattacagtttgggggtaaataaaggtgctaacttgttaaatgctaacaactaaaaagcagaagaatcacatcccatagtagcatttgtcgacctaaaacacaactttgatatccctccttattccacctttacaagtagaaataaggcatgtcccccaatcctctgcagaaaatgtcactgtaaaaagccaaagaggctaactcctcgcttttgagcttacaaggtgtttcagggagttttaagggataattttgtttgtataagatgtttgcctggtacgctgacttcagaacctcatcctgcccaagagtctgaacaccacagttggtacaaccctgttttggcgtttctttgatgggagggtgtggccctgccctgttgccagagagaacgcaggtgctgggtgcacagcacggcttttccgtggaccgactctaatctgtacaagagctcagggttgcgatggcacgggagaggggctttggtatccgccctacgtaagaagcttccaaccccagggaactctaactccgcctcttcacaatttccaggcgccgtcaggctcatcaggtctggccgcatgcccaggtccctcggattggactcacaggatcagcagcccgtagccttctttgcggtagtcgcgataggccttccacggtttgatctccagccgctgcgggtacgcgctctcggtgcggtacagcgcttccagcaggcatggcgagcccaggtgcaccgactcaaaggaacccaacttcatgcggaaaatcttgccatacttcttgtggtactccacctgcagccggccgggcacagcgcggtgtcagcgcgcatcctccgccgtgcccgaagcgctttccctcctcccgcctccttcctcctaggggaccggggaccctccctgcccagacgccgaagcgcaccatgcgcccgaggcgcgcatgtcggggagggtttggagcgccactgggagggcggaagagggaggagagagtcaggggcgcgaaaaggggtttaccagggtgtcgtgctgtttcttgagaccccctttccagagaatctgcagcaggctgcccagcagtggccagctggtggggcccggcagggcggccgcgttctgagtctcgccaccagctgtcagcgggcagactggcacctctcgcggctgaggggacgtgtacgccgtagatgtcaccagtctcgggggctgcctcggactgcgcagctgctgcaggaaggcggcaagcgagcggctcttgctgatgggggagctcatggcagcgggggacaccggagcgcgggaaggcaggaggatggggtggggcgaggttggtacgaggtgctagtgggagtcggggcttaacgattctgggaaaaggaagcaaagagggccagctggtgtgatggagcggggtgaggcgggacaggcagcagaaaggacctcggcgaggatgctcgacgctgcaccacgcgacagcctcagagcattggtgcctccttgcactggccgcaggggctggaagagggtggccggtgtctggggacctcttgaaaagggaaagctgggagtcctcctgttggtccgcaaggctgacctctagggtctggctggagccacggggaggtgtcaaggagggtagatgagatgctgctggcgctgcgtttcctcctgtccctctccatgttcctatgcccagggaccatgcatttatggagacagagcatgccctgggtggccaatgagcacgcagaggagggcggagtggcccccggctggccagactccgagggacgcgggacccaggggagggggggtggaaggaggatggagtcagcgaggtgagcgagggcgtccgggcctggggtgaccggggctatgttcgctgggcgcgggaggtggggtgggggcggcagactccaccccggagataacccccaggaagtcatgcgaagcccggagttcaccgggtgtgcttcgaacgcgcctccccgccctcccccggcgggcaggagccggcagcggcggccgtggttgccgcccggcgcttgcacaatcgcgatgccgggcgggcgaggtccccgagtgcgggcccagaaaagctgccggcgtctgccagggccccggggagcccgggcgcctcccggggagccagatacccccagcctggactgaagtgattttttttttttttttgcctttttttttttggaggaagtttggctttctgcgcctcccagggtggggaggatttgagtcttactgaaatgcaccagaagaggagactttcttaacttgagcaagaaggggagtttgtagaatttccttcctgctgtttcatgtttggttgttttgcagattaaatgaattaatgcacgtaaagcggcaacaacgaagccttgtctatagtcaacagtcaataaaagttagttgctgttgttacttctttaggaagttaggaaatgcgccttgagagcgtggcttgcaccaacgatgcttgaattcaggctgggccacctcccctatgtccactgcccgcctctgttcttctacaccgactaccttgtgcaaaggaggggcacacagagcttgaaaccaccgcccccagtactccccctctcccccaaggtgcgtcctaggcaggtccagtgacaaacatacacaatttctagagttaccgcggctggcaagagtagaactcgctttgctaattcaggaacggaagttggagatttttgttgattgttttaaagtggctcgaatcctttcaacctgatccaatacaaaactaccaccagccagggaggaggggagggacattctgtttcctcgccctgcttttcaattacgtgtctcagtcatttttgccccaagtgttggcaaatccttccctggtaaattcttttgtaagcctctagtttgtttcttaaaaatcttttgcagtccaacttaagctttaacaccatcatttctgatttgtctggaggggctaatgactgtttatgttaataaaaataatagctattgatatatactaaactttatgaatcttgtacatatttatatatacattgtatggtatatatgttacagcatacactatagattatgttatatgcaatacacactaaatatacataatatagtatagattgcatacagtatgtagattccatatgttatataatattctcatgaaagctttctagggcttatgataagtcaggcactgagctagacattttacatcattttttccgtttagttctcatctcagcccaatgtcaataaaatgaaataaaataaaaaacaaaaaaaaatcaaagacaaacaaaaaaacccttgactcttacagagctaagtaatttgcccaatgtcacagacgttaccattggctcaggtgggattcagacccaatattttctgattctaggctgggccctaaatagtacacccatatacatcatgctatgttatgtcactttttcttaaaccagagtgtctcagaatattggaagtatttcttaaatgagaattatcaccaagaggaaagtgggggggatcagaatgcctaccatgtcagtatgtgtggggcagtgtgaggcaaacgttttatgtgctgacggtggtgaaaaagaatagctctggctgagtgtagtggctcacgcctgtaatcccagcactttgggaggccgaggtgggcggatcacctgaggttgggagttcgagaccagcctggccaacatggtgaaagcccatctctaccaaaaatacaaaaattagccgggtgtggtggtgcatgcctgtaatcccagctactcaggaggctgaggcaggagaatcgcttgaactcgggaggcggaggttacagtgagccgagatcgccccactgcactccagcctgggcgacagagtaagactctgtcaaaaaaaaaaaaaaaaaaatagctctaaacagaaggtctatgtttttcactactgagtaccttgattctggtgaggtgcttggacacagtgaatggtctattgttatttcaactattgagtaattttcccaattattctttcttttccttctcttttggcagatatgcacaaggagaagaggaaataatttcagacttgctaggtttttctaagagtttcatgctatatagctttatatactctaaatagatatttaaatatatgggcaatcattagttacatgatagctaaaaagaaaattcctgtttcagggatattggtttctcatgttcagtggagaaaatccccagtaatttttagaccggattgcagaggaaagcaagactagttctttgaaacttcattgaccccaatacatacctgtccttgagaagtatgattaaattcaaaatgactatttttgatcccgcttccaggaattcactattcctcatctgtcctcatccttcactcactacttagcctctatgagtcatccggatagggatcttgtcaggaattactaatgagagatcttgaaatgcctcataaatgcctgccatcattactgagacaggctcaggccctctgttttgctctgggaaatcttaccaagtcctggaatggataattagacttcagccctcataccaagggaccacccatgacaacatgtgtgtgtgagttcacacacctgtgtacacatgtataatgagggtggggtggaggagcctgtaggagttcaagggctggtttctctgcactggaaaatacaaaacactttcaagtatatgcaatagtaatatagttttgtgcttaaaactgcttaggcctggcatgatggctcacgcctgtaattccagcaatttggaagggtgaggcaggcagatcacttgaggtcaggagttcaagaccagcctggccaacatggtgaaaccctatctctactaaaaaatacaaaaattagccagatgttgtggcagatgcctgtaatcccagctacacgggaggctaaggcaggaggattgcttgaacccgggaggtgaaggttgcagtgagctgagatcatgccactgcactccatcctgggcgacagagcaagactccatctcaaaaaaacaaacacaacaaactttgcctaaactggggcgtgagtactagatccactttccgttgcggaaacctggaggacttacttgccgcatttgttaaatggacagtgttggttccaacctcacggtaaagttcaagcttcatggaaacaggagtagtaacaatagccaatttcacggggctcctgtgagaacactgcaaataaaattcctaccacagtaaagtgcccagcaaatatgaccttgtagcattactgtattgcatgccttggttttttcaaagtccatagaagggaggcaatttagatgtctctgactcaagaaactgtatacttgaataaagccaaaggaagattagcaatgaaatgctggtgaattcaaatcccagctcagccactgagcagctagaaaaaccagggacaatttacttgtctctctctcagccttagtttcctcttctcaaaagtggcgatcaggacgggtgcagtggctcacacctgtaatcccagcactttgggaggccaaggcaggcggatcacctgaggtcagagttcgagaccaacctggccaacatggcaaactcctgtctctactaaaaatacaaaaattagctgggcatggtggtgggtgcctgtaattccagctgcttggtaggctgaagcaggagaatcacttgaacctgggaggtcgaggttgcagtgagccgagatagcgccactgcactctagtctgggcgacagagtgagactccatctcaaaaaaaaaaaaaaaatggtgatcatggtagtagttcccactccatagggtttttctgaggatgacaaagcactgaaagtccctagcacatgtgctcactgttaatgtcattaagaactacaggaactgggctgtcaaataattaaggtcataatctttattacatgtgtcttggagttctttgcccaattagacaaaccttcttgaaattataggcattgtttttttgtctttgtttttgtttctcctaaagcagatgacacagtgctgtttatgttggccagcacccaataagcaaataatgggaaattgattattgattatttcctcattcccaagtgaaaaggagaaaggttagtatcaatgtattctttgttttctgaggaaatcgttgggaatcctggagggctttatgtgtgggtcatatagaaaatagttctgtatgacaaaaacgatagttttggtctcaaaagcttgggctgaaaccatggctccaccactcattagctgtgtgatcttgggcaagttatttaacttctctgagtctagtttccttaatggtaaaattggagtttactatacctgtgtctcaggaaggtcaagataaatactaaaaatattagacaaaacacgattgtcttcactaaaatctgtttggcctctgtacttgcttgataatttctgagtagaattcagtcatgttggtaaattaaagttatatcacaggtatggaaaaatggaccttaagtgctttaaaatgcagttccgggtggggcggggtggggggaacttttcaacagatttatcactgaaagagctgctttattgcaaaggagatgagaaatacagtatgcacactcaatcattccaccattactacaaattataacttattaaggaactactatgtgtgtggcagacattgtattgtctccacccacacaatagcgctgtaaggtaggttttgttattttccattttataatgacaaaacctcactttcttacagagtttaagccagacctgggttgaatctgccctgttacatattaccattgtttccttgtcctcatctataaaatagaaatcataacagtgtctctcacatattattatagtattataattataataatattatatagttactgccctgtaacttaaagtctagcttgcttcaagatgccagcttcctgaggacaggaagactgtctgtcttaccctctgctgtattcctagcacctatagctatgcccagatcagtttaggtatacccaagaaatgtttgtcaaataatactattgcaaaaataacagcgattaagtgccttacttgttgtaactgtacttgttcaattgagtctatctttctgttaaacttagctcctggtaaaaaggtgtgtctagttgcaaatcttatatataaagaaacattttcttttgtttttttcctattttcaaaatatctagtaaaatagagatctgtgtgagacagatgtgcactctttaacaggttatctccacatgaaaacagagaatttattaaatgaattaatatgtgtaaaatatttgggaagatatagatgtagtataactactgatttaagagtcaagtgaagccagctaatgaaaaaatccattgatttttttaaatgttccaatggtgccatacatgtttcataattcagttttaaaattacatcatcacatagatacctattttatcctttcttgcatgatatgacttggctaataccatcagagtgaaaattggggaaattccatgacaggattattattgttgattaatttggacccaaagtatagtttgctctgctcctatatgtcaaaatcctgcctccacataccatcttattggtgttgacttggacagcattctgcagcatgattgagcttaggatgcatttttgccagagctttaatatgaaccaacaagcatacaccttgataggaaattggcacctaaaggcacctggtggaaagtacctctgtggttagatgagtaaactccagcagtgaatagggatatccggttttttgtttatgaacataaagtggcaaacaaaacaattacaagccaagaaaagtctggaagtgtcctttcatctttgagaaaaaaaaaatcagttagcagagtacttacgcagtctttgtgcagtagcaattgccaaacacccctcacaatccagattttattacttgatttttcaccaacagagaacagcgatgtaacctccttctgatttttgtgccatatgaaacagtggtgtttacagtattgaggaggaagtttctcagagttcagtcctattgcagcttgcatggaataatttgggatcttacttgtttatgtgaatattcacagattcctttagaataatgggactttccattgaaaaaaatgtaatgtgaatttccagtgatttattgatttgttttatactctgtccagttagaattctttggaagtggaatcagtccagagacggttattgagcatctactatgtgccaggcaccattcctagcactagggatacagtgatgggcaaagcagaccaggcacctagctttttggagctcaaattctactggggaagacagatcacacacatgtaaacaaagaaatagtataatttcagataggcataaaactaacatttgagctcagacttaaattgcgggaaatggtcagcttcactaacgcctggaggaaaagaggcagggggcctctctcagcatcttgagctcaaggtgtaaagagaaccacgaagagaatagcacacaggatgctgatcagatgcataaatatatttaatatttattctaaagacaaagaggtcatattccctactcccatctctaaatctaattatcaaatggctcctggttggcatgctttcatattgcagaggtgttttattttttcaagatcattttgtttagtggcacaggtgtgaaagttaagagtctaaatagacatgaagctcttaaaataagaaataaactgaataacgtcattaggattaccttctttatttccaccagttcacaggtgcaacaaggttctatgggctaagcataagaagaatgtaaatgttggtcaatttctcaaacactgcagattacatttagaagttatttgaaggccatttgatcagccaaacacagcacagacacccttgagcacctgcaaggttagaagcacatggctagcctctgttcttgtccctgaggaatctacttgctctcaaatcatgtgtttaaaatgaaacagagctggagtctgtgtgatgaacttccttgggttttacctgcccagcaaccaagatcttgtcttctgattgctgagtggttcacataggctaatctcaccctacaaggcaaagcccatgatttaggaccaatccacacattccttcctcttggctaaagttgagtgcatccacctgggatgaactcatgttccaggttagtcagatcagagtgaatgtggagacttttgctggagcaactaggaaacagaagactctttcccctgggaaggttacttgaggcccttgatttgctggggccaccaagtagagaaggctggcctcacggcaaagccagcacaaaggagagcaaaactaaaagaggagatggaggacagggaagagaagggaatgtcagatcctcatgccatcgttcagggccattcatccatctctggatttcctgtacatgagccaacaaattcctcatgttgcttattccactttgatctgagtttctcctcttgcgatttgaagaatactgactgatatagtcattctaacctatatattgctatttggattttatttatttttaatgataagaaacatcatccgggactaggaaagggtataatctttctggcctcaagcaatttaatggagcataattatgcatggacctagctagagatcccagtcctgaaatcaacagtattttatttctttatttttgttcattttacatagatgttctatccagtatgcttttcaaaaatatatttaattgttggtttggaggcataatgtggtggctacacacgtgggctccagattaggttgccaccttcattttttcacttttcagctgtgtgagcctctctgaagattcttttttaaattgggggaagcaatatttacctcgtagcgttattgtaaggattaagtaggataatataagtcagttacttagcacagtgctggcagagggtaggctcttatttaaattagctcttattattattcaattgataatatatggcccatctgatgtcacgtgctttaatctggtattatttgtgtttatcacatatgcttccttcacaaatcaaccacaagctatctgttactttgtctttccctttaggtatctctattggagatgaacgcatgttcaatacacgtggcctgcctgagtcattagcaaagtgtccaacaactctgaggtactgaaaaatgaaatgactagttaatgtagattgagagtccacatgccagtcacatctcgtctcacttaaatctcccaccaaacttctaaaaaagatgcagccgagatcatgaaactcaggaggacaccaagtcacacagcactcagttgtgatttgaacccccggggatccctgactcctgagccatcacccttgttcacattgagactgcctgtatccctgcctttccacaaagaatattcataacttgtagggcttaaaatgcgcgcccatgacttggatatgaaaaagaataactattttctatgactggcttcatctggctgtgtaacccctattcctgttgtgccacccttgggtaaataccttggagtagaatagctggctcctcttgtggttgggtgtttagctgtttaagaaactcttgagctgtttcccaatgtgattgtaccttttcacattcctaccagcagcataggaaagttctgatccctctacatcctccccaacactccttgtgatcttctaaattttagccattctattaggtgcagagttctatttattgagtcagtttttatgttgtgatttttcaggaaatctgtccatttttttctaagacattgaatcattgacatataattgcttatcatatgtctttattatctttttaatgtctgttaaagctgtaattatatcccctctgttattcctgatattgtttttgtttgtatgtgtttctcttttctttttttctttcattagtcttaccttgggtttatctattatagtcatcttttcaaagatccgactttatgaaatttctctttgtttactatttcatagatttttgctatgatatttattacttcacttgttcattctgttttgctcttaagctcccaatatctggacactgttatggatatcttatcttgtatggttattgatttccaatttaattccagtgtaactggagaacatactcttaaagcttttaatcttttaaaatatattgagacttattttttcgatccagcacttagtttatctgggggaatatgccactgagcactgaaaatgaaaatgtattttgcagttgttgagtgtagtgttctacaattatcaactgggttgttttccatttattccttctgttgttgttggtactactgctgttagaatattgctctattcttgcctttttggagggggttaatcaaatctttaagcattccattttatttatttgattgtcttctttgctataactcttatttgtttatttttggttgtctagggcaaataatttgcattcagaatgtatcaaagtccatttagagtcaaaagatgtcatggccttcaacagtacaattctagttatgcatcccatttttttgtgtgttcttgttattatatcctttacttctacttacgttatagattccagcttacaatgctgtgaattttgctttagtccttttaagaaaattacaggaattacaggaagcataactttttatgtttagccatttattgaacctttctggtgctgctccctcccactgaagatccacttgatctttctttcagccagaagaacatctgttagcctttctgggactctcgtctgctttttcacttaatccagcagtttgggaacagcatcaggcctcttgttttgtttccagttgcatcctcttaacagcacgctctaagggtgctttatccaatattgtaaaaggaaactaaagcaagatttgttttgaggattgcttggtgcccctttaaaaaaattagacaccaacccaggaaaagagttggaaaaaagtaccccaaaattttcccatttacctaggctgtctttaagaccaatatcagtcaccagcaattaccttttgttcccagacaggaaaattgaatgactgcatcaacgctaaaaagcttggattgaatcagacactttcctcagaagtgaaaaatgcctgaccacaagccctagttaatttaaggccacttagatggcgactccaggagaattccaactcagtgccccaagatttctcagggacttggatttctccctaacctactggaaaagaatttgtcatcagcaaagctcttccgtagagaaacttgagataaaatgggtctttcaacagggctgtgattgtgtgaagggatataaactggcaagaattgtgctcctcattcttgatggaaggttaacatgattaggatctccagaagtctcatatagcaagattaaattctattttgcatactgaagtctcagatactcaaatttccactagcatgttagattctcagtgtgctccctttatgtgggaaatctgtaacaaccacaaggcacactcaatccttcctcaggcataggcacacccagacccacccacatgcgcacacacccatacgtccacacgtgcacccaggcacccgtgctgcatgccctcacatgcacagccccacatgcaagcacacctccatgcaactttcctcaccaacacgaacatgcacccacattacacacccatatctattcccccacatgcacctcttcccacagacacatcttccacacatgcatgccccccgcacttgtgatttaatggcacatatgattcagaatgtctgtgaagccatttccaacctgtttttgtaataacctgtgcttctcagtccaaaagatagtggaacgtatgtttccaggaaaatatgaaacaggaatttctcaatctcctagcagcatccccaccctgctgtactaatattagtccatgttgccaatagcagcagcccatgtcagactggctgcctctcctccccacctaatccccacttttcttgtttgtaattgaagaacaaccgactgtatctcatgctcgggctgaccaatgagtaagcaaaagtgttatgcggggagacagccttctaattctgcagacattattaaaataatccaacacaggtacccgtgcaatcaattttcagtttctaggatgagagatatgtcaccttgccttcaaaaggccaaacctggctcgcttcattggctcccttctcaatgtctgatacaggacccaaaaaggtctatgcatcctgtggcaagaaggtggcatcctcacaatctgggacctgactctggtgaaaagtgttgtttagggaacagatgcttgatctttttactttcgctgctcgccaccctttaagaggaaaatcttccccaaatctctcttcaaatcaaatgccggatgtcaatggttctaaactaaagctgagcccctagaatcacctgggcagtgttttgttttattaatgctgatttctagcccctacctgagacctactccatgagactgtctggagtctctatgagccagaatttggttaaagttacctgggaaatcgaggggaagccaggtttgggaatcactggccaatatggtgatgcctgtctagagcctggacttcacaacccagtgatgtcaaccacacttattccacccatcgtgcctcgagatgtgggtccacgtgcagggggggcctctgtgcatggtggtcagagagctcgccatccctctttgtgtgctcttacccagctctccaggcagtcaagggctaaagggagaggtaggtgggagctcccttgagcagaggggcctttgtagggtgatggaggctcaagagggaatttcctgccctgttctggagcttgggcccccagtcctgcctgaagtcccagggtccacagtggcacagatagagacagctttccggaccttggagaagaatctcagtaataaccgggggcagggcggggtgctaattaccaaaggacactcactccctacagagttctcctcccgaacacaacttgatggaaggtaaacacccacacaggacatttaaataatgcccaagccggaatgcgttgataaccagtggcgtggacattcggcagctttccatttccagaacatactcgactgtggagaaaagacgatggtagctacctgagggccttagcatttgagccctggtaggtgagggaatctgtcagagtgaataataaactcagtactcccaaagaccacagcctcccttaatggtgtactccataaaccctcctgatttttttgcaagaattccacttgctctctagttctgctacttacattttccataggtagtggttaagaccagaatgagagaaacctgcttttaaggtatgagactgggcaagtgagcccatctttcttagacacaattttggcttctgtgaaatggctgtacttacttcatagaattgcttcaggaattaaataagatcatgaatataaagcatgaatatacagcatcaataaatattggcacataaatatcagtaaattactaatggtaaattactaaaaattaaattaactgaagccagagaaaagggaattccttagtttcataagaaatgtttatggtagatgttttgagaaggttaatttgtggtggaaattttggccaggtggcatttttatatgtataattttataccataattatatgtatatgtctttagaaccctccatcatgagagaagaagagaagattacttttgtgtgtgtgtgtgtgtgtgtgtgtgtgtgtgacagagtctcactctgttgccgaggctggagtgcagtggtgcaatctcggctcactgcagcctctgcctcccgggttcaagtgattctcgtgcctcagcctcccgagtagctgggattacaggcgtgcgccacaaagcctagctaatttttatatttttagtagagacagggtttcactatgttggccaggctgttcttgaactccttgcctcatgcagtcctcccgcctcggcttcccaaagtgctgggattacaggcgtgagccaccgcgcccagcctaaaagattactgaagggaatatttatataatatcttgaaaagcatgcacctagaagcaacttccaagggtcacagccacctggttagctttagagaaaaaagtgcctaaggtgttacattttcaaggatgtttgaagaatgtgagtggaattttctatgcagtttcacagggagagcaattatttgggtgtccttcagaattcaacactacatctctctcagtccatcctaatttaaggcactttccctgctgcataacttcattcatgttagttctgcttctagtggaaatggggaattcatatataatagtatttctaatgtttaggtttaattttttaaagttgtgaatttccaagctctcaccatctccttagatcttcacaagtcatgacatatataccaggttgaccaccattttacaaataagaaaattctgagagcagagaatttaaatcctgtctttattcagctcttaccataatcccccattttccatcttgagtatagtgtctttccatacctttgttgattattgagttttccttacatttagatgacaaatacgactccaaaatacacatttatcttgagtccttcgctgaccaacatttgaacctacagtatttagagaaatcctaaaacagacatttgcactaattccagaagctgaaggggctcaaaactccgggctctcagctctccagtggctagagatcatgtgactaacctcagccaatcccatgctctgtctggaggtgttcagtgtgcaaagaaacattgcagacttcagatacatttggtggcagcagccacagaattcagcgtccaatgccagcagtctgttattgcttgtaatagtgtccatgaatatgaatcaaaccagactttccctttggtataattttggccacagtttggctgcctaatttccctagatgcctgcttatttattcaggcctggttgtccagccttcttatcaattctacggactccccaatatccatcaacaaattccattgctgcataaccacgaaagacatctgttcttcataaacaagaaatgcggccatcgcaaccacatgataaataaaagaggcggtattcttcccagatgtttcagggcatcttctcttaaaccttcagagggtcctgagctgctcatttccgggacttgctgagccctgacagtaaacagacttttaacaaagactcgctaaatgttcagattttttttttttaaattaataagagaatggtccattttcttttcaaatcttaacacagagctggcaggatgtcccccatagagttcagagtcagaagttgtttttgatgcgccgacattccgtttgtgatagtcttgcctctatccggcacttcttaggcctcatctccttggcctggtttgtgcagtggttaaaaggggttgatttaatccagaccacctgagtttaaatctaactttccagctttctggctacacaaccttgggcaaattgctcagtatctctgtgtctgtttcttcatctataaaatatatagattttgataatacctacatcctaaggctatgaaaatggttaaatgagttaattcatataaagcatgtagaacagtgcctggctggtagtaaatacactgtaaatgtcgtctattaacatattatcctcacctctgatgcatacttgctcacttaccttttcttttctcaaaaccacctctcataaaataatctgaaattccttattgatctcattcaaaatctgtttctctcacaggcgtatcctcaaatgaagccttgtctctgtgaaattcctggtaagagaagttgaggcatcaatagtggatcaggaggtatttttaggggaagaggagtctcagtattcatggaactcaatgagacctccacctacacaaggccaaggctgcatatggatgtagagaaataaaactcagatgttgaaaagtatctgaagagatgatagcaaagggaaattatcttttatctttcagataaatcgtcattttatggaatgccacaggaagaagttttctttacaagttctgaagacttgtgatgaatgagtccatagtttcacctttgaaaatgtccctgggagtgtcaaccccatcacttttacttatattacactcataatcagttcatctcgccaagaaaaataatattatcctcatgcccaaacttgtgacttgatttgaaaaccagtaaatcagaaataaaacttcccatgtgtttttttcctacatgaatccaagtgactcagatattgtgttattcaataagactattaccatgactcaggtaaaagggccgtttatattttctgaagtctcaagtctagggtccaaaataaaactagcatcttttatagaataatttttctctaaaatgaaatgtgtatgtcacctggttgtcaaaatccttatttaaatctttaaggagaaaagcaatggtttggagagtggacttaagcaattgaatcttggattcaaatcatagctccagattgtatcagcctctataactaagagcaggtggcattacctttcccagtcttggctttcttattggtgaaagaaaaaaaagagaatattaccagtcttgaaatgttgttgcgtgtattcctacttagcagggtgcctggcacatatatgcaggtaatataaggctctgcttcgcttctggccaaaacttcctggcacaggaggacatggttctcagatgtgagaacatgttctgtcttctgcaggaaaccagaaggggttctcccttctttgattgcaggaggaaagaattctaatggaatccatatgttctttggccccatttaaaactccacactctggaaaagtagatggtgtcctggagtgaatcccaaagtcaggcccactggaaagggtcactgggctttctcctgcttcagtggcctgggattttaaaagttggaaaagtttatccatacaactttattggaaatgattgttttttattctattcttgcccttttatggtataaagtctttgcttttatgttgttaattttagatttaggcttctttgatttcattcacttccttaacaaagtaaaaagttggcaactctttgaagttgctgcaaccatattcccaactacagcatccttctatgagcctctgctctcttaatgggtatagcccaagggctagaaatagaccaattcttggccaggcgcggtggctcacgcctgtaatcccagcattttgggaggccaaggtgggtagatcacgaggtcaggcgttggacaccagcctgaccaacatagtgaaaccccgtctctactaaaaatacaaaaattagctgggcgtggtggcacatgcctgtaatcccagctacctgggaggctgaggcaggagaattgcttcaacctggaaggtggaggttgcagtgagctgagactgcgccactgcactccagctccggcaacagtgcgagactctgtctcagaaaaaaaaaaatagaccaattctttttctctaatcaggtaaaatgaacaaggatattttattttaattttttaaagacaaagtcttgctctgttgcccaggctgcagtgcagtggcatgatcatagctcactgcagcctcgaacacctgagttcaagcaattctcctgcctcagccaacggagtagctgggactataggggcgtgccaccatgcttgctaattttaaaaatatatgtatttttggtagagatggtgtttccctatgttgccgatgttggtcttgaactcttggcctaagcaatccctcccaccttggcctcccaaagcgctgagattccagacgtgagccaccatgtttggccccaggaaatttataactaggacaataaatgaaggcacaagagaccaatcccagttgttctatcctctactattctgtcaaccaactttcaagaaactaacattcgtgacatttataagatggtggcctctgctgcatgccaatcttgtgaagtacacacaggggcatgccaggtataagacagtaattacagtctccaacacagaacttcccggaatggaatcacggctcaaagaatcccacaaggaaagacaagcaagtgagcgtgaaaagccagatgtgaaaggcagcagaaatgcttcacgtgaagtaagtaacttatggaagctctagaaaagcaggaagggattaaacatgcattgattacgatatgctaaatgggctgggcgtggtggctcacgcctgtaatcccagcactttgggaggccaaggcgggcaggtcacgaggtcaggagatcgagaccatcctggctaacacagtgaaaccccatctctactgaaaatacaaaaaatcagccttttactcctaagcactgatttgggatttgagaaaaattttacaaaaaatcagacttttactcctaagcactgatttgggatttgagaaaaatccagctcatccgtctgatctggcctcttgatctcagaagctaggggagaccatttttgctccacacataactaaagccaatagaggaaggtggtttgcagaggtaaagaggattgaagcagttgagcagacagcacagaggagaaatgaggcaaaggtctgatgtcctaatggtttccatctgcaatctcttccaaaggcactttctgatcaagtagcaatttggactttttttagttgtaagcaacagaaactggcccggctatcctcatccataaagattgtattgcattcaaaggcttgcaaaagtgtggctagatgatcaagcttggggtgtggggaggattccaaaacggaaacccaccactgatgcatggccagaaccccccaccagaggatcctgctgtgaagaattaagagccgtggatccatcgacgccaggtcatctacccaccctctggctgctggcagtgggaagagcgagttggtgcccttccacttctgtagttgatactggggtcctgattgctaccggggtgctctggttatatatcacactccagacttggtggtgtgaaacaataacagtcttttattattatcatacctcatcatgctgggagatgactctcatctcctcactgaggtttcctgtgcagttgcagagagttggtgaccggggctagattcaccttaagtcttcctcactcaagtctggcagttgatactggctgagagctggggtctcagcagggaccattgattggaacactgctgggtgcctggacttccttgcagcacaaaaggtgggcaccaagggttaatgcccccagagagaacaaggtaaaactagattacctcttctagcccaaccttggaagtcatatggcaacttctgcttctgctgcacttttttggttagaggggactcaccagataagtccatattcaaaggaagggaagtaggcttttgatgggaggatatcaaagaatttgcagaaatgttttaaaagtacaattgcctcaacacgaaggaatctacttgatttcctaaaactagaatcctggttgctaaaggttccataagacaccccatatattgcttagcaaatcaccattcattgtttaaagtagttcaaattagtttcaatttcttgcaggcaaagacacccaacggaagcattggattccaagacattgaattccttgaaaggagagatttaaaagtacctagaatacaaccttccatatgacatttattaaaattggacaactatactttgagaaaatgattgatatgaattacagtgtgattgacctatggtctcagatccaaaccgtaaaccctacacattcccacggctaatcgttttaggaatagaccaatccccagatagtaagtgaagactcaatggattttggaagtcagtttggcacaaagaccctggaacagcttccggggctagaggtggagtttcctgttgctgaggtggaagatcacgagacaatcaagaaacatgcctcttccatggcttgaggtcaagtctaagcttgctcagtatctgttactctctgattgaacttccctttaattctcccatcagccaagctttgtctctgaggtcttataggaagtttttggcaaagtggcagaggtggtgaaggacatcatgaaaaacctggagccaatgaagcagaaagacttattctggaatacatggtgtggcatcctagaaaactctagatatgacaggtaaaaacctgtggagggaagagcgcgttaacattcaacattgaagtaagttaacctcaacgaatggttgtttggttgacaaaaaatagacccaaacagagtgatattcagccagtatcattcaaatacctgtgggttatctgaacaacattcttgctttcaatttcttaatgctcaaattgcttagacattttttctttcccaaacaggtgggtaaatctaacttttttggtgtctctcttggacatcccagttaatgctgatagttaaatttatactagacaatcccataggaagctgcccctcagagatccgcctgcttcctggagacacttctgacattcttcaaaattgccagataacatttgaatagctctgcgttagaatagccaataacccctgcattagaatagccaatgtaatcactgattcttcagctgcactccagagccttagggaataagttgcatgaaaaattttatgtgtatataatatataattatatatatatcatctacatatatttatataatatataattattattttatctacatatatttatataatataaatatataaacattagtttatatagttatagagaacagagggcatagcatgggtgagtgcccccagagagaataaggatggaacaaatatataataaatatctatatttatatatataaacaaatggaacaaatatatataaatattatatgtgtatatgtatatataataaatatatattttagatatttatgtatacattacatatataaatatatatatacatatagtgaatcaaactcgctatagcgagtgctcatgctgtgaaagatatctgggaaagagactgatggagggaaccgtatacaccccaggctagactctaagctttttgagtgtgggtgtcatatctgttttgtttgccagtgtatgcccagaacctagcacagtaagtgacacctagatgacaggacggactttgcaggcatgcagcccgtgtggtcacacagggtcctgcactcagaagatccctgcacatgactcagtgctctactgttgccatcctgaaattgttaatagtgtttgaacaagaggccttgggttttcgttctgcactgggcctcacagtctgtggttgctcctgatgacattcaataactatgtgttgcatgaatgagtcagaggccaaggccaggattatgttcctaccctacccttaaactctgggtcaaggtgagagtgttcctttaccggaatcgaaggttcgtctctcttgctctcatttgctgttttcaggctgatttttccagcaatgagtaacagcaggggccatccgtttacttcaagggaaaactctcctccccatgtgcagctggtctgacccggttctgcagcaggacaatttgccaagactttgatgcagaaaattcccttaaggggacttatttggtcgtaagtatcgtgtgtgaaagacatcaatatttaagtcctggttgggcttcatcagattcaaccctgttcttgtccagttttatcaaaatgtataaagtctaatcttagggaacaaatgtgcagtgatgctaatgaattttaatagcattggacgtctttgatgccttgtcttatgtcctcctgacctatcttgttgctctggcattaagttgacaaacagctgtggccaggtgaacctgacctcagtagtacctcatgtcctggggcttttctactggccacaggcagcacctgcagccatctagcgcaagaccaaacctgaaagtgcaggagaggtaacacctaccggggcaacccttggctgaatggggctgggtggataaatgctgtctctgtagtgaggacagttctgagggacaggtgctggagaccagagggtttgcaggaggagcaagctccagcggcccacagggtcatcagcccagtggcagcccttggaacagcttcctatcttcacctttttcacgtttcctccagcttccccagatcccttcccaccatgaactccctgcagcaagccctcgtctcaggctctgtccagacgttaatgtagccgtgacgcatcagtgagcactcttttgattttaagtgacagataactaaaccaaactttcctaagcaaatgaattcaatgactcaagtcattgaaaagttcaaggggacagctagctgagctctcagtgtgactaggggaatgctttctatcaggccctgttttatctctccctgttcctcagtttcacttctgtgttggttccgtttttaaatgagttcgctcctgatatggcaagataccagccactatgccagaactgccatttctacagcttcacagcaaataggaagagagggcttctggctcccattggaatcagaagttgaggctctgattggcctcagtttggttctgtgcttattcctgaacagtcatgtgaccatgagttgctgaatggctgacggctgttctcaggctccaccactaaggtggtatgacagtccacccagatcacatggactgatagggaggaaggggagggtcctcacattgaaatcagggctattgccagaagagcacgaaatgggtgtcgggaggcaagcaccacatgttcaggagaactaattcttcttgggcagccaatcaaatgtggagtctgataaatacaattttgcttcccattccccatcagcaaagagattattacaaaataaagtctgtaatgatgagttacagttggatataaacctattaaaataatgcattatatagattaattccctatgtatgcattattcaagtgcttttaatacagttccccccctttggggagtgggatcttaaaataaaaaggagaaaagttttcattgctatgttgtcctatatatcttgtcaaattatgcaaaaaatacatgtagacttgtttcacaaacataactagatagcataattacttgggtggtactaaaatttgtttgaacaaagttagttctaaaggaagtgaggcaggattctttttgagaagtataatatttaatttttatgggtatgggaaaatacagtgtagatgagaataactacgatttgtatccttattttatcagataacagttatataaggtatagaaacttagaggcattacccaattgtcctgagcctcctttcaccacctacaaaatgaaaattatacctatagtttgaactgaattaatttgcaaaattaatttaagaacccaaagtatatattaaatgcttaagagaaatacagcctctttttaaggccattgacaatttagggactgcccctcctcctcatgtcttcgcagacagcttttccggagcttagcaagtggtagctcgcaaagtactgaaatcttctcctaggatccatgtcctacactgctacaagaatcactgattacattggcaattcaacatttattaggtcaaatggaatccatcgtagccaggacctcagctctccttcagtatgctcagataacacctgaccgaatatgggaagaggctcattgtgtaaacacaaacgtggaagtgccttttattaaaacaagattttacctgtagaaagatttgagcattcaatttgcctcgaggtagcatctttacctggaaatgaaatctcattctgttattggagccaatgtgtttatgtcaccattggatgcaggaacaacttaaaaaataatagtatacatatgttatgattaactctaaacttttgtttactttaaggataagctaaaaaaactcactattgtcaaaaatagcttctgtaatttgttcttttcacaagaagtaaaattcttgtgttattttttattctctgtaccttgcgaataactcataacttaggagttcccaagttatgttcattcctccattgcaatctctgtcccacccttccctttctttccatttccgttgcaatgtaatgtaaggttaagagcatggaatgcaagaggtgccagtttcaactctagctctactgtttctagctctgtgtcctcgagcacattatgtcccgtactcttgcctcagttataccatctgtgtgtaataatgataatactacctcctttatagggttggttaactaatggtctgttttataaaggtctaaaaacattgtatacgttgaagggcttttaaaaatgctgtacttttagccaggtaaaaattcggttaagaattcaaactagcaaaagatgattctactttggcccaaaggcagtggtttcctgggtttgtgtcatcttgctttgcagcgtgtagacaattcttcaggagttgcagagagaaaaataacatgccagattttggggtcacagtgccatctgctgaagaaaggagtgttgctcgaacaatgagtccacatgatcacaatttgcgtaagtactaggcctagccaaaaaacaaaacaaaacaaaacaaaaagaatgcaataagttatggactcttgtacattgtagtggagtgaattcctcaacagcttacgctgtattatatattactgtattaatctctaaatacattatcacttatttattcatgcattgatttattcattagttaacatttgttaagcacctactttcctgttggtgccgcaacaacagagatgaagaaaacaggcatgatctgtttcctttggtgctctcagtttaacagggacacagaattcaaaagggaatataccagggaggcgtagaaagctgctttagggggcagcggatgctgctcttgtctgggagatgggtgcgtttgaggaaagcttgtgtcttagtcagtctatgctgctacaactaaagtcctgagtctaggtaatttataaacaatagagatttattcctgacagttctggaggctggaaaatccaagatcaaggcacctgtaggtttaatggctggtgagaggtccagtctctccttctaagatgccaacttgttgctgtgtcctctgcagggcagaatgctatgtccttacatggtagaagaacagaagagaatgaaccttgatatggtttggctgtgtcctcacccaaaatctcatcttgaattgtaatccccataatctccatgtgtcaagggaaagaccaggtggagataattgaatcaagggggcggtttcgcctactctgttttcgtgatagtgagtgagttctcacgaggtctgatggttttgtgtttggtagttcttcctgcatttattcttgatcttgccgccctgttaagaaggtgccttgctttcccttcacctcccgccatgattgtaaggttcctgaggcctccccagccatgtggaactgcgagtcaattaaacctctttcctttctaaattacccagtgttgggcagttctttatagcagtgggagaatggaccaacacaaactcgttccctcaagcccttctataagagacccaatcccattcttgagggctctgtcctcagacttaaagacccccgcctcattgtaaaaccacattggccattaaatttcaactacgaactctggaggacacattcaaatcatagcagcttccttgatgggagtaacatagacgctgagtcttaaggataggcagacggtagaatgcagctggctgaacaataggagaaaggcatcataggcagcaggaaaagcaagtgcaaaggccctgaggcaggagggagcgtgtagcattcacagaatggaggcccaagagggtgaagcacagtgagtgaggggaaagatggtccaaaacaaggtcagggagggaggctaggccctggtaagaaatttaagtgcaatgggaaaacaatgaaacatttcaaacagcgttatggaaaaaccatttgcaaaattgtttagctaaatacaaactgacagtacttaacattacccagcacagtaagattcaaaagaagtgcaaaatattcggaaggtggatttgaatgatttaagtctggggaacactgtcatgttcctcgggtgccctctgcaggcgccaaaccaaattgctgcgtgatcctggggatttgctccttcttgcctctcactcctcatggccagcatggaagaggaatctgatcaaggtttcctttttaaatcttagaaccaggagcctggagcaggtgttgcaggttttggagggcacccaggtgcgtactgccaggaaatgatgtgataacctcattctcgctttgtgacaaaatctaaattaaactgggacatgtctggacaattttgtagcttacataccaattcaaacaggttttttttttctcttcattttccagtcaatatactgaccatttctgtccttatatcttcctcacggagtgttcctgatggtagtcacacagtcttttattataattttatgagttcttgttggagcgattaatagcatttatactaataaaactttctaacatactgtataatttacttatatgttttggttatgatctttttcctatcaatagaatgtaagctacatgaggacaaagagttttgtctgttttttcagtgttatgccctcaatgctgagcacctgcccttcttggtccaagcaacatcccactgattccacagtcctcagggaccactccagcaagattcaagctctttctcccctggactcgccccagggttgcagcttctggtgctgtgactttggtcatatgtttgccaaccataagcttcatgatgccaagcaccttgtctgctttatttttctgcttgcaatagcacctagcatggtagaaatttcaaacaaacacacgcataaatgctctcatttaggtatgttaaaacagaaggctgggagttacaagttcatatacctggagggcctcacaggtgagcacatggatgggcaggtgccctacatgtacctgtgtgcgctctgtgagtgggggggtctgccaggcccaggagagagcctgctggccgaatgtgccaggccaaagcagcaccagcagctgcccatcaggcagaaacacaggtgcaatgtcaccaggatgctgattgtaccagctcaagcaaaactaaaaatctcaaatattggttccactaaagaaaaataccatatgggtcaaagaaaacatagcctggatccagtcagtgggaggccagttttcaacctggcataagggaaagtctttccaaatggtcattgttgattctcctccctgacctgcaggatccacatgcttccacttgtaccccatgcttctccccggagagccagggacagtccccagctggagaaaggaccagaaacaaaggtcggaaatgctccacatcaggaaatgagaagatgctcagcagacttgaaagtccctgtaccatgcggacttgcagaacgagtttttctgctaggagagagattagctcaaaggatagcaaggtctggggagaggagagggacaagaatgatgagaaatagaatgagaaggaaaacctctaaagcaaggggaagataggggcatcagagggagctgagtcagcaccaagactgccaggagccgccactgtcctctgtccagattcaatgacactgccctgtgcccgcagactctctgcccagtgccttttctctctgcttttgtatggtctgtgtggggaactaatgcatggagaagcgtgcaccatctcatgataatgatggagcagccaaagcctcatagagcatccgattggagccatggcttctttgagcccagccaaagggatccagcccctacctccatatcacctgttagaggagacagtgccccctagcccttctgtctctggagcccctgtctcctggtgcaatttctcagctcagtgactagctaaccaggcacttggacattaaggaagcatggtgatgaataagtgggccctgcatgaggcaggcttctcagggtttcttggcagcacatgtattagcatttggaccaatctgattttattttattattgttatttacatttatgtatttatttttaatgttgtgggtacacagtaggcataaatatttatggggtacctgagatattttgatatgggcatacaatgtgtaataatcacatcaggggccgggtaccgtggctcacacctgtaatcccagcactttgggaggccaaggcagatggatcagctgaggttggagtttgagaccagcctgaccaacatggcaaaaccccgcctctactaaaaatacaaaattcactgggtgtggtggcgcaagcctgtaatctcaactactcgggaggctgaggcaggagaatcccttgaacccgggaggtggaggttgtggtgagccaagatcacgccattgcactccagcctgagcaacaagagcaaaactctgtctcaaaaaaaaaaaaaaaaatcacatcagggtaaatagtgcatccatcacctcaggcatttatcctttgtgttacaaacaactcggttacactcttttagttattttaaaatgtacaataaattattgttgactgtagtcaccctgttgtgctatcaaatattagatctcattcattctagatgactaatttttatacccattaaccattcccacttccccgtcccctagtacccttttcagcctctggtaaccatcctactctccatttccatgggttcagttgttttaaggcttttagctcccacaaatcagtgagaacacgcaacatctgtctttttgtgcctagcttatttcacctaacataatgtcttccagttttatccatgttatagcaaatgacaggctctcattctttcttttttttatggctgaatagtactccgttgtgtataggtgccacattttcttttgtattttcattttactttaagttctgggatacatgtgcagaacgtgcaggtttgttacataggtatatgtgccatggtggtttgctgcacccatcaaccttcatctaggttttaagccctgcatgcattaggtatttgttctaatgctatccctccccttgccccctacccctgacaggccctggtgtgtgatgttcccctctctgtgtccatgtgttctcattgttcaactcccacttacgagtgagaatgtgtggcattttgttttctgttcctgtgttactttgctgagaattatggcttccagtttaatccatgtccctgcaaaggacatgatctcattcttttttatggctgcatagtatttcatggtgtgtatgtgccacattttctttatccagtctatcattgatgggcatttgggttggttccaagtctttgctattgtaaattgtgctgcaataaacatatctgtgcatgtgtctttatagtagaatgatttataatcctttgagtatatacccagtaatgggattgctgggtcaaatggtatttctggttctagatccttcaggaatcaccacactttcttccataatggttgaactaatttacactcccaccaactctttatccattcgtctgttgatggacacttaggttgtttctgaatcttggctattgtgaatagcgctgcaataaacatgggaatgcagacatctcttcgatatactgatttccttattgggggttatatacctagcagtgcaattgctggattatgtggtagctctatttttagttttttgaggaagctctctactgttctttgcagtggttgtactaatttacattcccaccaacagcgtatgagggttcccttttctccacatcctctctggcatttgttattgtctgtcttttggaaaaagcaatttttagctgggatgagctgatatctcattggagtttggatttgcatttctctgatgttcagtgatgtcgagcaccttttcatatctccatttgccatttgtatgcctgctttagaagaatgtctattcagatcttttgcccatttttaaactggactattagtttttttcctattgagttgtttgtgctcctcatatactctggctgttaatcccttttttcttgccttatttcttaattaaatattaaactaaatatttagtttgcaaatattttctctcattctgtggtttgtccaatgtaattttaaagtcctaaaagaatttaattcactgactcttcagtatgttataacctgaacttcttggctgattttatgggcctcagtgttagacagcacctaaggatgtgtcatgttaaagcctcttggtttaacctgtctttgttctcacctgccattggccacctgctccaccccagcagctcccacagtgaccagctccacaccggccatggtgtgcagacttgcagggctgcctctccgtccagttggctcgtgcttacagcctcacaccttgttcctccacctgggggcttccctgtggaaggctgaggtgagaaaaattatgggagcctcaatgagcaacctggaagtgtctgggagtgaggtccccgtggggccagcctttgaatgggaggcaggaactggcaaataagagttctccccagctgaactctcctgtgttctggttaacacagcctcttacaggacagtccccagagagggagcaaccagtcgtgcttgataccaagcaaaggtcggcttggtgaggcctcctggtatgggctctgctgccttccctgacctgcttcattccgctttttcctcgctctggctgccctgggattgtactccttaatgaagaagcagtatctaggcctttgccttggggtctgctttaaagattccggctgggatggcttctaaccattgtcattcttctcccccaggatgctttccaatttctacacatctgaaatggatgctacagtctcaaaaggcagcactaatcatggccatgggggtagttagcagtaataccaagccaggggagttcttgaagaggagatttgaaagatcataacttgggcagtggaatttcagacgcaactgggctgaactgagaaagtaatcatagctaacatttcctgagagcttacaatgcattttatttgcacgtattatctcttctactctttgcaacaagcctattagagacacattattatttttgccatgaaagtaacttgtctaacatcaaaattagaaagtggtgcaggtatgatttgaacgcaggcagtctggctccagtaagccctttattgagtcttaaacactttactcatgcaagtcaggtgacaggagctgcaatgtccactatgagctgcccactcggggacacatctgactttatacatgacttgtggtgatgggtaaagcctggtgcttaggagagtggtctctggagccaggttcaccaagagttcgaacccaggctctggtacttcctggctgctggagccttggccaagtagctttgtcctcctgaaactctatttcctctcctgtaaaatgatcgataacaatattgtgtggtatggtgaggattaaaacatttagcaaggtgcaggccacatagtatgtaccctgtcagttttgtatgttactgttactattgcattagtccgttttcacattgctgataaagacatacccaagactgggtaatttataaagaaaaagagatttgatggactcacagttccacgtggctggggaggcctcaccatcatggtggaaggcaaaaggcgcatcttacgtggtggccgacaggagagaatgagacgagagaaaggggaaaccccttataaaaccatcggatctcatgagacttattcactaccatgagaacagaatagaggaaaccgcccccatgattcaattatctcccaccaggtccctcccacaacacatggaaattatgggagctaccattcaagaggagatttgggtgggaacacagccaaaccatatgaactctcattattattatacttcagcaaaaggcaaaggttaacgtaggtgagagtttaggtcccttctggtcctaagatctatgcacctgaggattgaagtgcttctctctctcaaagcccctatgctactttcggtccccaccatacaattacatttcctcaaaattcctgctccgctgttcctcagctttcaactcagccatttctcaataaagctttgaaaaagtcagaattctttctctctttctctctctccctcccccagtttggcctcaccaagttctaaaacatgcccagatctggcccctgccttgcaccccagcctcgctccatgctgctctgtcctttctaccatgtctcaccaggctctttccctctcagccctccacccctggggtccactttcgtctcctctccccatgctgaggcctcccattttctcttagcttagaggccagctccagagctggcccccacccctcccctctgtgctctgcctcagcacctcatttatctccttcatgcacttggtaccatttgtgacaattttgccctttatttctgtctccctctccaccatttgtttcttgcagtgcttttacattgagctctggaataaacagatatcactgatggagcatctcctatgtgccagacccggtgctaagatttaaccctggaaaaacatctttattcaacaaatacttttttgagcacatatgagctacacactggaaagtcccaatactaagggcctggagagcccagaataggcaggagaacaggcgatgcccgtggcgggctaggtggttcggtggggagggcacagggtgctataaggtctcattcccctcatttaaccaaagaggaaattgggactttgagaaaggaggaggcttgtcaggggcagttctcaagctgtggcccatgaacctcgggggtccctgagaccttttcagggatccatgagggcctccctttcccaactacatgatttgtatgaggctggggtttttcatacctacaactaggcaactaaacagtgtatttggagagactgaatgcagaagtagacatgagaatgtaaccttccattaagcctgatattaaagagatcagtgaaaatgtaaaatgatgacaatcttctcaatttatttttgtcttagaaaatatagttatttttaaagtgtgatttttattaccatggaatggagttttatattattttaaatgaattaataaatacattttaaaaattctgctttaatttctaatacagcaaatatcgataaataacccacataaacaaaagttctttggagtcctcagtaatttccaggagtataaagaggtcctaaggcaaaaaaaaaaaaaaaaattactaattgggagacacaagtgtcagaatatacagtaattgttcagtaatattgctgtaaattaattaataggattgcctagtcacaacagcaaaggcatggaatcaacccagatgcccatcagtggtggataggataaagaaaatgtggtccatatacaccatggaatactatgcagccataaaaaagaacaaaatcatgtcctttgcagcaacatggatgcagctggacatcattatcctaagtgaattaacacagaaacagaaaaccaaccactcatgttcccacttatgagtgacagctaaacactgggtactcgtggacataaaggtgggaacaataaatgctacggattccaaaaacggggaaggaggcaggggaaaggggttgaaaaattacctgtggggtactatgttcactacttgggcaacgggatcattagaaacccaaaccttagcaccatgcagtatatccatgtaataaaccggcacacataccccccgaatttaaattaaaaaaaaattacattaaaagataggagtacctcctttacaccacctgaattatcatggcacataaatctcacaccctatttgccaaggccattcgttcctagctgttttacaggtaggttagctttctcaatgcaagtctgtgggacggatggagaaaaattccccgagccctttgatcctgccccagctgggccccgccgcgctgagccttgggcgcgccccctgctgcccgcggccggagccgttcgccacacccccgtgtttatgtcggtccacgggggttgcctgtccctttaattggcatgtaccaagtccttccaggtcacatttcctccctacgtcccagccgtttggactcactggccaaaagtccaagaggacggaatgtggagacagtgttgtatttttgcggggagttctaggccgaccgggagcgagagaacgctcgggggcgaagcgcgccattgcggccctccccgccgcctgcggtagtccagtcccaagatggcggccaccatgaagaaggcggtgagtggggagctcggggctctggatgctcgggcggcgccggatctcggccgctggggcccgggcgcgggatgctgggggtgcgcagctccgaagcccggcgtgggacccgaggccgaggccgaggccctgagagcggtcccgcggcaaggcctgctcgcgcctggcgccctgagcgttttcctaggcacctggccagccgaggcggggcgccggggctggggccgggagcctcgaaggacgcaggtccgcctcccgcgatgccgagggtgcccccggggagtctgaggaacctgcagccccggcctcgcccctgaggtgtgggaagccgaaggtcccgttgagtgtggttggccttgactcgggcgttgcaccggcatgatcgcattagcctcactggttatgggtagctgctgctgggagcgtggttacgggtgaggaaactgaggcccagagatggggagtcacctgcccgaggttacgcagctcataacggggacagcaggttcctgcatccccagattagcaggccccagagaccctgtgtccaacctggagctgcccatttccacgcttgatgcccctgagtccttcaggctaaaaccagtatttattgagaatggaagatgtgccgggcccagcagccggccgtttatctgttatcctccccgcaactcagcaagtgcaatgggttcctctccactttgcaggtagagaaacttagacacagagcagttagaggccctaaagtgactcagctagtaagaagcagagctggagttcaaactcaggtttgtttttgtttttctcaaagcacgcctgtgtaaccactaagccggctaaacttccatgtggggtttttaatcccgtgagccttcccagatgtgtaaagatagtcagatagaagaaaaagaaaattggagagggggaaggagataacggctgataatttggggagctttacagtgtgctaggtacagctgtaagttgttttgcgtgtattgtttattttatgttctttgagggagatactgtttttatccttatttaacaatgagaaaacaggcgcggaggcaaagctagcatttaaacacaggcattctgactccggagtctgtgttttaaactgctatagggggtctttgatgagaatctcttggctggagggatttgcgttcattccacttttaagaccacattagaacttctttgctttgcccctatccagtaccacatagtctatgccatctgtgcctggtgtagggtgacccattgcccccttttatatgaaattgagggactgccaaaaatgggaaagccccagccaactcaggatgtgttgctcaccctactattctgccatccaaaaattcttactgtgtcccagagtagggtctagggccatggtgattcaaaaaagtatgaaactttgtgagattcacttcacctctagtttgttaaattgggccctctggtgttaggtatggcctttaattccttggaagatactagttgtggttcactccgttttataggtatggaaactgaagtgcagagaggtgaagtaaatggtagaagaggaaatggcagaagaatgatttgaaccttggattttgattgcaaaatttctaattaccaactttttttttcctttcattgattcagtaaattttcgggggcacgtaatatggcgtagtctcagttttaagtggagacaactgtggtgaccagtgagaaagctcttctccccttaatctcatagccccaaagaacgtatgttccagggcagagcaggcattactcagatagtcagacagaaaactagtttctctgatgagaactgtgaaggaaaagtgcttatgaaatgagggccaaaatgaggtctgttttgagatcagagaagactttcctgggaaagtgccatttaagttgagatctgtgagattatgtaaggaaaggaagggagagttggatagggagcgaagcattctagagaggagtatctgcagagactctgagtgcatttaatacaaggaaggcccgatggcagataatcaggggaagagagtttgagccatgatgggaaaagaacttatagaggggtaggtggtggccaaaatataaaggagcttctttaactttggaggctttaagagtcacatgatagatgcagtgtcctcctgtagatgtttccagtgttaggaacaattcccgatagattagcttgcatgtacacttttcccctttgccctcactaggagaaaacatatgtgtatgccagtgagtgagagtgaaacagagagagatagccctttgagtttaattaaaagcaaatcgtacaatctggagtactttacgtttgtaacacatcgtatctctcaactggtcatgactttgctggggagagtgtttagatgagatgattcagtcctctcctctctagagttctgccttctaagatccagttcttgaccataaggagatctgcactttgatttctgttcattatcctatatacaaatgtcctttcctcagagaggctacctttgacctttatctaaagaagcctccttcactccccaggcccccaaaactttctactcctaagctgttttattttcatcatcacgtttgtcaccattgaacattatcttgttcatcttgttttttgctctcttcctccaccaggatgtatgcttgccatttgtattcatgaaagtgggatagtggctctcttgtcacagtgcatggcgtataggaaacagtaattgttaaataaactactgcatggatgaaagttgaatacaaaaattagctgggcatgatggcgtttgcctataatcccagctactcgggaggctgaggcacgagaatcgcttgaacctgggaggcagaggtcgcagtgagccaagatcacaccactgcactccagcctggcgatagagcaagactcgtctcaaaaacaaaaaaacaaacaaagaaggttgaatacaaatacaaagcaaaagtttacatcatacagacttggtagatatgtttttaaaagtaaaaataaaagactgaaattggccagaatttatttctagggacccagctgtcagtgcagactccgtgtaatacctagacttggtgtgaggcatgactgagtatggttcagtttcctcctctaatcccgtaagatattagttctcaagaaaagagcccagggaattttaatttttactttggatcccgagcaggcatatttctctttggcctagcagaatttctttctagatctggatctgttctttgtaatgatttttgataaacaatattcaggatgtaaaatgcttagctatcatttgactgactccatcatcaggctttctcctacatgttcattttatcaaccctataaggtaggaactagcctctccattttacagatgagaaacctgaggtggttccaaagaattgggtaatttgcccaaggttcctgtttgcttggattggattgcagcctgactcttcccaccactctgtgtgctgcctcagatactataggatatgagttcttcctagagttcttctgactttgagagtagctacagctggtttccctgaaggcaggagttcctaaccttttggggttgtggatccctttgagaatctggtgaaagctatgaagaccttccagaaggatgcacatactatacatgccattttgcatacagtctctgggtatatcgacctgtcaatgtccattgaccacccccaccccccagttaagaattacccacttctggctgggcgtggtggctcaagcctgtaatcccagcactttgggaggccgaggctggtggatcacctgaggttaggagttcaagaccagcctggccaacatggtgaaaccccttctctactaaaaatacgaaaattagccggacatggtggcatgtgcatgtaatctcagctacttgggaggctgaggcaggagaatggcttgaacccgggaagtggaggttgcagtgagccaagatcatgctactgcacttcagcctgggcgacagagtgagactctgtctcaccaaaaaaaaaaaaaaattacccacttcttgccaaaatgcagcttcaagaaatgtaggaatgttctaggacagtgagactaaaacagaagcctctgttagccatcaaaggcactgacatcttactgtctgctgtaaatggcactccactgggcggcatgcagtatatttgactcacacatcaactttagcccttaaccccagtgggaaaaccactgtaaagatctggataccaggggccacatgtgtgctgatgcctgtggtttggtggggctacaacaggaaattcctgctttggaaagacagaaagcagatagccaaattctctctaccacattttggaaactatgtgtttgagtctgatcaagcatgatttagattcaaattcagaaaccatgtattagccttagttatgtgccaggcagtcctgcactggatccgttcatgtgaatggctctgttgagccctcaccaagacaaatacatctataaatgcctgttgggggttcaatatttaaacaaaatggcatatactcttcaggcaaacaggaactcttcagaattctctgctgtctatttgcgtagggaattgacagttctcacttaggcaaaatgacttgtgtgccaagatatagactttggtttcttgagcgtagctcagtgttccccaacttccatattcatcaaaattatgcatacggttgaacactcaaagctagacatagtgtgatgtaaaggattttttcaggctatcttctgggttgttgaggtggggcataatgcatgtgaaattgtttcttggaatgagagcctaacaaaggggaggactgtgttatattccgaccactgagctctgtattgcttgacactgcctttcaacctctgagaaataaaagttcacataccttaagtcgatggtcatgagagaccaggtcagggatggagtgtgaatgttgtgagctcattactgttactgcaaaagagccaaaagtagtgtttcagtatgaactatttttatacacacacaaatatcttttcttctttaaactagaatcaggtgctctggttttcattttataaatggaagggaaaccctaaggagagtctggttttatgttttagctttattttttaaaaatatatggtacctccttgagaatctgatgaaagcagacatcctgctgcctcttccagatgtgcctaagcctgtgtacacactcacacacacacgtgcacactcacagagacgcacgttcacattcagttaccgagaactcatggacctgtctgacctctgaagccagtctgcctgggttgaaatcaagttccaccacctactggctctgtggctttggccatattatataaagtgtacctcagtttctcaatctgtaaaatagtgctggtgatcctccctaataagatggattgcaggattagcagagataataaagtacttaggaagttttggcacatagtaaattcaatcagtgttagctatttttttattatttcattggtactttatgttatccaagtactctttatttgcaaatttgtaaatttaatcacattaaatattaatttttaaatactaaacattcaattttcatcattttttagtaaagtagaccttattaagacatttaaacaggtcctacattataaacataatttttgctgtgaatggaatagagccactgaaatgtacagtgaccctttagccagtaagctcatgcaagttttagctctaagaaaaaaaaaacactactctgagacatttaccaatatatttgaccatgtaactttttgtttcctgggtcatcttaatgaaagaatgctccaacttgagaaattctgctctgtgccaaaagttggctttttttctttccttttaaaaggacttattaattgttctttatgtttgcaatatgtttatagcttaggaattattttatggagtatcagaaaaggttatagatttacaaacaaaccttaagcttgtggagcaaaaaataaggcatttgttatgttctgtacttcttgtgattcttgactatatgagtgcaaatggcttattgagttattgttgagaaatataaaaagctaactgataacttctccgttaaaattttacaaaaacttaaacacttctttcaggctgcagaagatgtcaatgttactttcgaagatcaacaaaagataaacaaatttgcacggaatacaagtagaatcacagagctgaaggaagaaatagaagtaaaaaaggtattgaaaataattattagaagaataaaatttttttatactatagctactaaaactgaactcagttaacaagtgaatatatatttctctgggctgtttgttgcagatgaatgacgcgatccactctagttaagcagaaagtcattttttttttaagggatatgcgataacttacagagttgttgaggagcttgagtctagaccgaggttccaggaacaagtctcggagaacttggctggcggtggaacagctgttgcctccactgatcccagagtcagctgtcttcccaatgaggaagccacccttgcagacttaggaacaccaagctgctgctgccagtgccacctaccccagtaaatctggggcctgtgtccagccgtcccccttgagttgaaatccagctcaaatgcatttgattggtggaattgaagttattatcacttatgcatgctggcagaactttcattacccgcatgatttacttacaccctatcagcaagcaaggctgagaaatgtaggctggtttttttggttttgtttttgtaggaaggcagaattcacaaagtcaaaaattgttaaaatagaagaaattttgagtgaccatgtgcctgctgtccaccacagggcgcttattgtccagaggacaaagctttaggtagctctaagtgcttgcttgtgaaatgtcttctaaaaagttacaaattaaggtcttattctaatgtggtaataatacctttgtgagagggtccctcagagagttgctgtccccaaattacaattggcctttagcttctatcagagaactttgagtacattttctttgccattttgcatttatagaaacaactccaaaacctagaagatgcttgtgatgacatcatgcttgcagatgatgattgcttaatgataccttatcaaattggtgatgtcttcattagccattctcaagaagaaacgcaagaaatgttagaagaagcaaaggtatgttaaaggttaattctgaaattagaatttatatcactataaagaacatgtaattatagatgtagggaaatagtagatgctagctatagctaatatttactgccttgttatgtcccaggcatgctccgaatgctttgccagcaggattttgttgaatcataacgatgacctgttatcccaatttagggacaaagaatagaggcttagagaggttatgggatttattcaaagtgacacatagacagtggtcttctgactccagaaccttgctcaaaactaaaagtatttagaaggtatagcatatattgaagcagaaaagaaaaatcccctgtaattctgctatgcagaggtaaccattcatagtgaacattttcctgtatttcttttatgttctctctgcctctctccgtgtagtttgcttcccagttgggacaattaatgttccaggaggagcatttttgctggtttcattgaatgtttgtttgtccagcagatactcattggaagcctgctctgagcctggcacacaggcctttaaaaacatcgtttttgaagactgtttaatatcatgttgatggttatcaattggggtcacgggtcttattgttagcattaatttgtttccaatattttgctgtactaatgttactgtgagcattcttctacataaatctttgttcacatttagaaaattgttttgaggaaataattagagaaatataattactgggtcagtcagcatatgagttctctgataatatctgagacatttgatacatggtatgaaattttcagttcacatgccttcttactatttgggagggacagccacgttgtttgtctatgagaagcagatggcaattaaacctttcctaatgcttttgctaattaacctgattgcttaaaatgatagtctctcttcaaatgtcataaaaagcaaaacttcgtatgaatgaaacccacatttagtaagtcttcagaagaactatcactcctgggtctttccatgcataaatcttatatgtctcccttatgtttaaatcttttcttcttggtcaaattttgtgatttttgttctttttatttgtttaaccatttaaaaaacatttttattggaagtattcccagatagcttatggtttttgtggctattgtgaatcccctgccccatacacagatagctactgaacttttattttattttatttatttatttatttatttattttttgagatggagtcttgccctgtcgcccaggctggagtgcaatggcgcaatctcggctcactgcaacgtctgcctcctgggttcaaacaattctcctgcctcagcctcccgagtagctgggattacaggcgcccaccaccacgcccagctaatttttgtacttttggtagagacagggtttcaccatgttgggcagactggtctcgaactcctgacctcgtgctcgtgatccacccgcctcagcctcccaaagtgctgggattacaggcgtgagccaccacacccggctgaacctttctttttttactcattctagaattctagaatgaatggagtgcttactctgtatcaggttctgccatgtactagggataattggggacaacaaaacctgcctggcccctgcctgcatggagcatatagtctagatggaaagaaaaaaaagtaaacaaaactgataatgagtagaaagtgatatgaggatagaggtggctttaagaacacaggaagaggaatctacactagtctggacatcaagggtcagggaagggctcccagggaaagtgatgggataacagctgaggaataagtggctattagccagaaaggggcggcggggggcggggggttctagtcgtgagaagcaacatgtgtgaacggccataggatgacggtggtgcaaacatagacctgcaagaagatgtatttgctggagattgggagcacctgaaattgtggccacatcttggagaactccagtcagttgagttgaagaaattgtactttgtcttagcaggggtcagcaaactttctgtgaagggccagaagtaaatacgttaggttttgtgggctgcacagcctctgccataattactatgaaagcaagatgagtgaatctgcgtggctgtcttccaataaaacttgacaaaaacaagcttcaggctagattgggcctgtgggctatagtttgcccactcccgtcccagagcaaagaggagccttcagagatttttggaaaagagagagatgattggacttgcgatattaaaatgactttctagtgtcttattttacttattaaccaggttttctcggtatagaaatttagaatttatccctttctagtagccatatgtcttatttttgtttcttgttttgtaacagtgattctcaaacttagcatgcgtgagaatcacagtcaccacagggcttgttaaaaatccaggttgctgggcccgacccaaagacgatctttcaggtgggctgaggtagggccccagaatgtgtatttctaacaagttcccaggtgattttgtccctgacactggtctcggggccaccgtttgagaaccattggctagatttctaaaacggcaacactgtcagtattagatattctttggtttctaatgttagtgggtatttggtttgtgtgatttcatatttttttgtcatgtttaggaaaaaaaattgttttgatcctagccaggaaggaacttaatggcttttttttttttttttaaaacaaagagtatatgttaaaatttatttaatctattaatgagggaagcattaacattacaaaactggttttagaattgaagaggctaagtatctatagataggtaggtagaaagaattgtcctttggaattgtattttcttttttttaattataaattgacaatttataattgtataaatttatggtgtaaaacgggatgttataatttattaatacaatatggaataattaaatcaagatagttaacatgtctatcacctcaaatacttagaaaatatctgagttttcactgggcaaagctgctctttcttacaaatgaggcactttttaccactcttttccaaagtttagctccagaggcctcaaagttagtgaaaatttctgccagatttggatcataagttgttcttcttaattattggtggttggtggtgtgagtttctatcatttcctgtagtctcatagttatttttgttgttggaaaaagctgggttagaagccagcaggcccaggataaactatttatagaagtctttgtatttggttctttgttaggaaataatttagacagtaattttttactattttttagatcagcagaaactgagaaaacaaacttgatttattctgtgataagcagatatggaccatgaattaaaaatgcccacattcagacatttagatctaattatcagtgttacttagctgcctgtccaagtttagaaggttcttgacctaaaattcttcccaaatattatttcagacacagatgctcagaaatcatcctattgaatagaattaatttaaaatattttttttccagaaaaatttgcaagaagaaattgacgccttagaatccagagtggaatcaattcagcgagtgttagcagatttgaaagttcagttgtatgcaaaattcgggagcaacataaaccttgaagctgatgaaagttaaacattttataatactttttttatttgtttaataaacttgaatattgtttaaaatgataattttccttcttcaaatgacatggaaagcaaaactttcttttttaaaaattttcatttatttaatggaaacttgcccattttcacatgtctgcttatttattttatatttttaaaagaagacagtattcacctatgtattttgcataacgattatatcaagtctaggggcttcatgtcatgttattaaaatcagttaagcaatcttttatgtttctatattatttagaatatttgttgttgcaattttcacataagaaaatttaacagttgtgtcatgttgtttctgtctgattttaattgctgtctaatgacggggaaagcacgatgaaaagatgtacaatcctgcatccttgcttatttcacaactaaagctttgtcatagacttcaaaatatatatgtatatattttatttaaatatatgttacatattatatttaaacatacatatttaacattttttacatatctatcaatatcagagatttgggtaaaagaatgggtaatgtttaaacatgtggaggcatgtggagctttatacaaacagggcagaaccacagaagaacgttttagaaaccaagagatgtgcagaaagaaatgtttagtgttttttcgttttaaattttagattttattttagtgctttgtaattaattggggtttatattgataaagatgtggaagttaaacagctatgtatgtaaaagtaaggcttatttcttaaataaaggatgcatttcttcccactcccccacaaaagacaaacattttgggatttgggagacctaaatgtattaactttccagcagatggcactgatgtgccaaatgtgaatggaaggatcctaacacaacaatgagattgttaggattaaatatacataattttagaggaaatatttttaatttttaaggctaaactgcatatgtattttttggttcagtgtttataaacatgaattcaggcttaaagatagatgattatataatttctaaaattcttaatactataaaggcagttttttcttttcttttttttttttgagatggcatctcactctgttgtctaggctggagtgcagtggtgcgatctcggctcaccgcaacctccacttcctgggttcaagcgattctgccaccttagcttccagagtagctgggattacagggacttgtcaccactcccaaataattgtatttttagtagagacatggtttcaccatgttggccaggatggtctccatctcttgatcttgtgatctgcccgcctcggcttcccaaagtgctgggattacaggcgagccattgtgcccggccaaaggcaaatttttaaattgctgcaaaaatcttcccaaatagtgatattccagttctggaaaatgactcttaccaaaaaaatgcaaggatatttttttcttgcatccatttggttaatgttcagttagaggattgaggctggggaggtagtcaatcaagttgcagcaggaaataagatcagaataatttgaggaaactctcaccaaagttaacaatggtgccgggtgaccactagggtccttttggaccctcaaaggccaggggagagagcaactgcccacttcactccctgaccagggaaagttgcttttcatctggggaggaacacagccagcctgtgtcatacctgcagtggtagagccaggggactagacatcctgacctcattctccctccaaaatccacctgtgtcccaccattggccaaacccaaccagaatccggaggtggtccatagaagtcagtcgcctgcagggcctgggaggggtggggaatggataggtctggggatcccccagtggaagatctagcataggagggcgactaaagtttagccctttagaaatgttaacaacgaacactcgcctgacatgggccaagagactgaactatgtaattcactgggacttcaaattttgtcctgcatattatcaagaaaacctaatacaaaaacccaaatatctaacatcagtgggatggaagcgtgtgatgttgctaacttcattttcttaacttacctgtgacattttagaacattacaaatatttgattcccattttaagttcatttctaaagcctttgcttatttttgtgaatagtaacttccctgggctagctgaagactggggaacagcacgcggtgcatctgaagggaaaggaagaaatgtcagcttcagccagtagttgcgacagagggaagttttgatctggatttgtcactaacttcttttttttttttaagcaggaatcttgatttgcatgtgcaatcactctttttagactgggccactatttgttttttaaagcagtgcaggctacacaacagataattgcacaacagatctggccctgagactgccaggttgcaaagtcaggtgcataatatgatacgtcatgtgcaggcttttcacaggaagtggtagtagaagtcttctgagcagctatgctttgctgctgactgtaatgtttcattatctctcacatccattaatttctttccatctccacaactactgtgatccttgtccaagccttgtgagctctagtcaaaagcatggctaagtaagggagcaaggggatggaaaagccatttgaggtagggtttcgacagggggtctctaaagggttttgaatagaaaggagcagtactttttaataatttggcagttgttaggtgggctttactgtagaaagatggaggtagaaatactggatgttattgtaccttttctggtgagccgaatcagttggctgaagaaaagatacaccaggacttagagaaggggtgaaatgaacaaattttgtcaatgattggagaaacgaaggtgaagctagaaggagaaacccaaagagaagttggttttgagcacaggccagtacagcttgcaacaggttttctttggcttctatagtttaacaaagaaaaaaaaaaccctgaatttgttgccacaatcaaatccagagatctcacataaaaatgcacggtttggcaacattgaaaccatatttctaaaaggcagtcttcagctgctcatgcgttagacaaagcaggctgtctccagttcaccccagtccccacctagcccactaccctcatttatattacctgcgtggtgcctgtctgtatttgctttgtaatctctggatgcctgctggtagtgtaagcagaggcaggaaagaaagaagtgtctggtttgcaggaagcagggcagaggagggggagggtgagagaagggcacgagcttggcatcagcacttggacttcccagggcatcagccacgtggagacatgtaattggcaaccggaaaagtgtgttgaagtttaggatatgcgggactagggaggtatatttgagaacccttttcatcctacagaagggcttaacatttaacgcacataaaaatcacccggggattttgtgacactgcagactctggctccgtgtgggctcgggctgagatgctgcctttctaacaagctcccaggtgacgctgctgctgctgagccctggtgccatgcattggacagctaaggtagcttgccacgaagaagaggacgtggggaaaatgcaggtgggaggaaaaagaaacagcaaaggagacagaagctgcaacggtaatgggagatccgcaagagtgtggaatcccagaagccatgatgagaatgctgaaaggaggagggagtgtgatcaacagcaaatagtacagtggcgaagccaataagagccgagaagatggagctctatttgatgactaagaaggcccttatttccttcaaaagagttaacccacccctactccttacacacaaactggagctccaaacaccctagaccccctgacccgaggcccccacacctgagccccatacccttgaaccccacacacacctgagccccacacacacctgagccccacacacacctgagccccacacacacctgagccccccacacacctaagcctcacacaaagctgagttcccataaccctgagccccgaaacctaagtttccccacccctaagacccccacatttgagccccacacacccgagtcctacatataactgagtccccatacacctgaggcccccagactggagcccccatatactcaagccctcccacacacgaactccccacagagctgagtctccatgtacctgatctccccacacctgagctcccatatacctgaaccctacacacacctgagacccccatacctcagcccctcccacatctgagcccacacacacctgagttccacacacacctgaggaatcagctccctcccgtcaggcaccagtgattctcgggggtgataattgtgtggtttgaaaaagcctgaacacattaggtgctgaggatcaaaaatacatgaacaattctctagttcagcgtttctccaggtgtgaacatggaaccaacatcacctgggaacttgttagaaatgccaagtttttcacaggactaaaccctgaaaaaaaattcccccactgggcaatgatattgagcaacataatggtcattgccttcaaagatgacttcatagcaactctgcagacagggcccagggttttaacaagcactccaggtgattctgactcagcgaaagagctggtggggttcaaatcattccatctttctgggattggagggcgtgggggtggtgttgggggaagagactggagcaccaactgagaattcttaatgcagattatagtgctggagagggtaacaaaagagggcagcatcaaagagattgacccatccagtttagggatcgagggtagctagaagcattccggttgctggtagtaaacagattataaaagattaagcagtaggtggtgtgagacttggaggcagcaagtgaaaagtatttttacaagaaagttaacagtggtgggaaagaggcagagcatcacttaatgtcactgtggtgcagatggaaaggctttttttttttttttggactagggaacacatgaatacacacagtagatgagaaggagccaggaaagaagatgatggaaaagtcaacggacaagaggtaatagttggagcacatctgtgaaagaaaggggtgctgtagtgcttatacaaacggtagactgggaaaacacagaattaggtgtatatgttacaaaaactcctaaggaataaatggtagagaaaaaaatttagaatagtgatgaactgtaggaggaagatatagttggggtaggcaaaaacaggaggaggcttcaataatctttatgttctatttcttaagttgggtcatgggtccatagttattggtagtcaatatgtttattattaattattttatgtacatgaaattcttcacaataacaagtttttttataaagttctgttgtggcacaaacaaactaggaaaaatgtgcattactgtggcattgttattgatatttctgtattgcattcaactacttttttgtcatttgacataaaatggatcatggtgactctccagttttgttttgtttttttcttatagagacagagtcttgctctgtcacccaggctggagtgcagaggcatgatgttggctcagtgccaacctccgccgcccgggttcaagtgattctgttgcctcagcctcccgaatagctgggactacgggcccatgccaccatgtcctgctaacttttttgtatttttagtagagatggggtctcgccatgttggccaggctggtctcaaactcctgacctcaggtgatctgcccacttcggcctccgaaagtgctgggattacaggtgtgagccacggcgcccagctgactctccagttttaaaagtagaaaatcagcaacaaccaaaaagttaaaagttggcttacagatttggtatagaaaattgtttgtgcaacagtcattagcatccgtttgtatgtagaaatttctggtaactaagttctttgatcctccattctggtatctaggaataactctagtgatggcgacgttaacaattagctttgagtgcttattgtaggctgtcagtcttctgaattttttttatatattccttcctcacaagagccctttaaagtagattctttaccatccctcattgtgcagaagtagaggaaggtttagagacgttaacctgccccaagttttgcagcttacttagcaaatgggtggttaatgaatgcacaagttgtacttttgaaatttattttgttagatgattttatttgtgttctgttacttatccaaaggaatttcagatcggttctcatatagacatataaaagtatatgtgtgtatatataaaaatgtaaatatagcattaatagattaggaaaaaagaaagggagaataagttggtcacagagtccacctttcagattgatgtactctgaacctctatgtagctaagacagagaaggaaaaatgatgagtaataccacattggaaagggtgttatatatgaatatctcaggagacaaaacatctttcagaggtctaaaccttaaaaaaaattttccctcattaggcattgactttgagcaatgtatcagatgctaactttaacaaagacttcaaagcaaaggcaagagcaaaattcatatggccaattcttgtagcaattaaacagttaacctaaatccaagggaaataatttagaaagaggccgataatacgcagccaacatccacagatgtaccctgagctaggcattagatatcttatgtaccctgagctaggcattaggtaagtattcacatacattaatcattacaaggtacaaactagtattatcatcatgtccatttacagatgaggaaacagaagcccagaccaaagttccaaggcccctaagtgaggagccagaactcaaacccaaacagtggggcttccaatctgtcctcccaaccattctattgcaatattgaagaatcttcttacaatcttcccagatccaaggacagtccataggtcacttcaaactcagaatttctcttcaaataggaattagagagcagaataatgatggcctttgtctatgaattaaattaaaagaccttcttcctaggaacccattttaattcagtcctataagatagcaaaggtatcagattatacccacagaacacctggaattctgaacttgaccactgtgcacaataatattgggggccaggcttggtgagccaccatacaccatatggagtatggaggctaggggtgggtagatcacttgagtttaggagctcaagaccagcctgggcaacatggtgaagacttatctgtacaaaaaacacaaaaattagctggatgtgtggtacatgcctgtggtcccagctactaggaagactgaggcaggaggactgattgagcccaggaggtcgaagctgcagtgagccacgatcatgccattgcactcagcctgggtgacagagcaagaccctgtttcaaaaaataaaaattataaaaggaaaggaaaggaagaaagaaaagtattggggagggataggttctattgggaagggacaatgaacaccacagccataaattctgattaattttgtaataatacctctgacattcacaatcttattgtaacttggagtaacgctggaattattggtagagttcgataaaacctatagtaacacagatgagcaagtgtactagaaaactgaattaaacttttctcagggtgtgatactgatggaaaataattgacctgaagaggacttgcagttaattaataatctattaataattgttttaaatcatttgactcaaacttataaagtccaaattatagtagctgatagtggcataagaactgctacactcatgcaaaaatatgaaacttatgtccaagaatcttggtctgcttcacctctcccatccttgtcgctaccaccttgggctaagaggcagtgagtgtttatttggactattgctggtgtcttctgatgggtctcccagcctccattcttactcacacacgtccccttcaatccatttttgtagccagataatctttctcagactgcaaatctaattatgttactctttctttgataaccacctcctcccccctccccccaaaaaaattaatgttctcccccttggtgagagtagtgaaaatgaaaacacctgacacagcctgcttggtctgaaccctatctacttttccacttcccctttgctctccacaccaaccacaccagccttatgccagttccccaggtttattatgcaccctttggtcatagaacctgcatccttaccaggtcaaagccccagatatactttcatagttccacatgcttctcctttgttgcaagaacagctattacatttatattgatcattgcaaattattgacttgtcttcctcattagactgaaatcaggaaccatgataatgctttgcttattcccatcttcccagcccctgcctaccatgaaatcaagcacacgacagtgctcaatctacactggaatccaacagttctgcttgatatggtttggctttgtgtccccacccaaatctcatgttgaatcgtaattccgaacgttgggggagggatagggtagaaggtgattggatcatgggggcagatttccctcttgctgttcttgtgatagtgagttctcgtgaaatctgatggtttcaaagtgtgttgcacttccccctttgctgtctgtctctcctagtcacccatggtaagatgtgcttacttcctcttcgccttctgccatgattgtaagtttcctgaggcctccaggtcatgcttcctgttaagcctgcagaactgtgagtcaattaaacctcttttcttcataaatgactgagtctcaggtagtcctttatagcagtgtgagaatagactaatatactgctcctagatgtgtacctaatagacatgaaaacttgtgtccatcaaaatacgtattaaagaatgctcatgcaatagtcctggtttaccctagggggataatgtgcccaggccatgcttgaaaccatggatggtactctatatatataccattttttcatatatatatatatctccatacctatgataaagcttaatttacaaattaacacagtaagagattaataaaatagaacaattataaaaacatactgcaataaaatttatgtgaatctgatctctttgtctaaaataatattttattgtgctgtactacgggtaactgaaatctcacaatgtgaaactgcagataagtggggacttacttgggtagttttattctgaacagccagaacctggaaacaataatattatcaacaggagaatggacacatacattgtggtctagtcatacaatggaatacaacacagcagtgaaaaagaacatctcattatgactgcaaaaaaaaaaaaaaagcctgaatcttacagacatattgttgagtaaaaaagccagacacaaaatagtacattctgtattattccacttatatgaagtttagaaacagtggagggtagggaaaggtcaccgcttagtgaaggctaatagtaacaactatttatatggaacatttacaaaatcaccagcactgtgcagagaatttgacatgatcctaactaagtcacctccccagagcttaccctggatttttttattatccccattttttagattaagaactaaggctgtgagcagggaaataccttgcccaaggctacattgctggtaagtgcaactctgcacaatctcacggtatcctgacaattactgttagtcatttcttacagtgctgcacaagacacgtctgtcattgttttgccagaggactgtgtgagataagatgctgagcattcccccacaaggcctaagacatagtaatgactcaataaatatcatctattatgatcagtcccatgaaaataaaaatagaggctccacgaggtggctcaaggccatatagctaagtggcattgcatttgtgcagttttgattgtgagttctattgttcaaattgattctaagtgacttacatagttactctaaatgcagcaccacgctatgattttcatgggtgttgagtatttttgcctgcctgagccccttctttcataagccaaatattaaaaagcatattttatgactgccttgggacaggcaaatgtaacccaggctggattatattcaccctactttctgattttaaaagaaactaaacattttcataggcccttaaggtgccatgggccctaggcattctgcctcctgtgcctaacagggaagtaggccctgcctcaatgcagatgagattgtcacgtgctgggtgaggatggtgggtttcttctggggagtggaagaggctgtggttgaaaaagacaactgaagatgaattctttgttgatgagattatatttgtcttgttcttttttaaaaaatagccatacataaatgatttagccaaaggcatgaaatgtcatttgggttcaagtgattgtgaagcgtttttgatttaacaaaaaatcataaaatgatccagaaaaaataggagactgcaattcatagaaatgctattttgtgcgattttatctgatttggaatggggttgaggagaagtaattgatgaaatgttatgaaatgctagaatttaaataggcctgatgtaaataatgaagcatgctttcaggctttcaaaatacacaattctagtctcagtttaaaaagtggtcagttggagccaatctaaacatatatagagactgatagcagcaaccatggcatagaatacatgtttccttcaaagttttaaattacctgtttgcctagagtctgaaccctgctagaaggcctttgaaaaagcattgaagggggagaaaaatccctcaaacaacttacatagtatttgtccatgggatttgaatggctcttagctagtaactggtgtttgcaatcttttatggaggtctttaaaagcaaacaaacacataagaacaggggactgaagtagtatactgaacacattctgaatgttatggaggacacaacaggatacttacacatcttcattttgtgcacttaaccatgactgcgtgctgcacaagacaatgggtaagtgtaacatatgagttaattttggcattatggctgctattaatgcaaaaccaggacaacacaaagacaatatcacacctttccattctgtcaagaatggtgggtgcaagtgctctcaggacccagtaatagaagagcagatgaatgtaaaaccaacaggaaagccatcatcagtgcaaagaaaatgggtgcagagataattttttttttttttttgagatggagtctcactctgtcacccagctggagtgcagtggcgtgatcttggctgactgcagcctccgactccctggttcaagtgattctcctgcctcaacctcctgagtagctgggattacaggtgtgtgccatcatgcccagctaatttttgtatttttagtagagatggaatttcaccgtgttggccagaatggttttgatctcctgacctcgtgatccagcctgcctcggcctcccaaagtgctgggattataggtgtgagccaccgttcccagcccaaatgagataatcttactctgaccccaggtgtgttcagaccagaagagctacggctggatctcacccagatgtctctgatgactgtggggctcacatcagtgaatgaggcagggtgggctggtcacagctatcttgcttagagggagcagaactctctaggtgaccacagttttatacccaccctgattgtctcaacaatgaagtcgctgtggcttttatggaagagcaatttctaggttgtctttcattttatgttgatatcatggtttttagagtacttggcagtgggggagacggtgatgacaggcaaagatgtgtcgtacaagaggaggaaacagccctgtggcttcagccagctgttgccatggtggaatgtgggcaagactggccaagctttctgactgtccaagaaaagccagtaatctgaaattcttttgtgtgaaatctcccaatttctaaatgttgctgaatcattcaaagatttaaaagacattaagaagaacatgacaatgaggaaaaaatgacaaacatcagcaaaccccagttcccagactgccaattcataacccagttcacagaccaccaactcacaggggaatctgagcctttgtagaaaccagtgagggttgaacaaagccctttaataaatagtaaaaaggaaaatctcatctttcctttggaattttaaccaaacaacactatttaacaatgtgttctctatcttcaacctataggaagaaaccctttccttaacctacacaaaaagtaaataaatctacggcaaggatttttttttttttttttttttacaacatcaatgaatggtttaaatgtgatttttttagtttatgtctttcccagttgctatcatgggttaaaagagattgcagaatattgcacaaaaggaaagaaatatgaagttgcttcaaaagatgaaaaaacagtaatgggcagatttaaaaaaaaattgtcaagaaaatatccaaacaaacttaaatgtcaccagagagtttgccaataagtccataaagcaaaaagattattaacctcaagacagagctactgttgggatcacaggaaaaccatcagctgtgcaccatttttattgacacttcagggtaaactaataaaactccccatttcaattaaattttggaaactcatgttccctttttcttaaatgctgtaaaccagcttataaccacacagccccttttttctaaaatctcctcttggctgaggacgtggagccaatggcacattctagcatttttcttactatggctttcctggacacaggcggctataagacgtgatgttaatgaaagggggaattgtaactatatggttttcatttttgcaggtgagcttgttgagccattttgaaatcaagtgctcctttagggtgtgcttagtgttccttttcaggggttcctggaatcatgtccgagctgaaacagatcttggggaattttattacagattttacagactggagaattgaggcccagaatgtctaaccctgccagagccaaagagcaagaaggagtcaacttcaattccatgtctttggtaggcatccttctaaattgactcccacttacccctgcctcctggtattcatggctctgtgtagtcttcttcctttgaacgtgggctggacctagtgacatgcttctgatgaatggaacacagcagaagtgatggatgtcacttctgtgtaagtcacaaaagactgtggctgccatcatgcttgccttcgctttttctgacacacatactctctctctctctctggctcttctcacatgcttgctctaataaagccagctggagaggcccatgggacaaggaactgagggaggccatccaccattgcaatgaaggaacagaggccctcagcccagtcaccctggagggactgaattccaacaacaactatgagtgagcccagaattggagccttcagatgagaccacaaccctggctaacaccttgattgcagctttgtgagagatcctaagccagaggcccccagctaagtgatacatggatttctgacccacagaaactgtaagttactctatttccatagtttggggaaatttgatacacagcaatagatagctaccacgatgtccagggctcttgactctaaggccggcattctttgtttcattggctgcctttatattctttgtagatatctgcatcctattagtgatcactggcagaacaatgtactagttaatgtccaggatataaagataagagtggcagagtccttagtatcactgcattttgctttaggactagaactatattttatttttatttatatatatatatatatatatatatatatatttatttaagttctagggtacacatgcacaacgtgcaggtttgttacatatgtatacatgtgccatgttggtgtgctgcacccattaactcgtcatttacattaggtatatctcctaatgctatccctcccctctccccccaccccacaacaggccccggtgtgtgatgttccccttcctgtgtccaagtgttctcattgttcagttcccacctatgagtgagaacatgcggtgtttggtttcttgtccttgtgatagtttgctgagaatgatggcttccagcttcatccatgtccctacaaaggacatgaactcatcattttttatggctgcatagtattccatggtgtatatgtgccatattttctttatccagtgtatcattgatgggcatttgggttggttccaagtctttgatattgtgaacagtgttgcaataaacatacatgtgaatgtgtctttatagtataatgatttataatcctttgggtatacacccagtaatgggattcctgggtcaaatggtatttctagttctagatccctgaggaatcaccacactgtcttccacaatggttgaactagtttacagtcccaccaacagtgtaaaagtgttcctatttctccccatcctctccagcacctgttgtttcctgactttttaatgattgccattctaactggtgtgagatgatatctcattgtggtttggatttgcatttctctgatggccagtgatgatgagcattttctcaggtgtctgttggctgcataaatgccttctcttgagaagtgtctgttcatatcctttgcccacttgttgatggggttgtttgtttttttcttgtaaatttgtttgagttctttgtagattctggatattagccctttgtcagatgagtagattgcaaaaattttctccattctgtaggttgcctgttcactctgatggtagcttcttttgctgtgcagaagctctttagtttaattagatcccatttgtcaattttggcttttgttgcccttgcttttggtgttttagacatgaagtccttgcccatgcctatgtcctgaatggtattgcctaggttttcttctagggtttttatggctttaggtctaacatttaagtctttaatccatcttgaattaatttttgtataaggtgtaaggaagggatccagtttcagctttgtacatatggctagaactaaattttaaactggccatcttaatgggatacaacagggcttccaaataagactagtttccttattgggaaaatgaatatgacaatgcctgtatcattgttctattgtaagaaataagaaatgcttacacacacacaatgctctctgtgtgctgagctctacacaaagcactttattaatattaactcatttaattctcataattttatgatgaagacagtagcatcacccttcattttacagacagggaaattgaggcatatagattttttaaaagattacactggtgaaaggggcagaaaaaagattcacacctgaggcgatcgttgagttctagagtctgtgttttaacaattttactttcttgcttttagaacaatgaagaacaatggaacaacatatataatatcttagcacagtactcaatacatattaagtgctcaatatgtggctgctattattattattaaagatacacttccattgtggcattggctggcaatggcagatcctgcatataacaaagattttatgaggttttgatgaaagctgacctgaagcactcaaattctttaggatatctgtcaagtgaaaatgccagcatttaaaaatgcttggatctaaagatatcaggatactttctattgaatgtgatctaaagcaaacaaacagctagccaaaaatttctcctctgtcttgcttaggctaagaagcaaatgtattgtcacgcataactgaacattcagaggcaggattggcttcaggcaggctggattcaggctcatacaatgtcatctggatttattcctcctgccatctgctatgctagcttcatcctaagactacattcaatagtgcccagcatctccaatccacgcccttctgtcatcatggagagatgattcagtagctccatctttatatgtttccaagtttgggccacatgaaagaatgaaaaccttgtagagcttaaaaaattaaagattcattctgattggactggcttagtcacatgcccatttctgattcatatcagagagatatggtggtttgagaccaggtcatgtgctcttctctcggaggtgtaagtggagtcacatcctgacccatgaactagagcagaatgggctactatccgagaaagtgggaactgatgtcaggggctcactgcaaaatgttgaagccttaacatatctacatgtttgatgtctagttctttatagagagtaaatatatgagtcttccatcattttgattcttgcttttgtcttgtgtactcttttgatcattatttttcatagtctgctttcttatataactcaacatttacaataaggtatcctagcaagcactttttaaaaacatatataactgcaaaaaaagaatggaccacttttctgggactgtgcctattgaagaaatgtgggctttattattatctcttagttttttgtgtaaccttttaaagtgctttatagctctctctcctcctatatttatctttcatttgaaacaagtgaaaaacgggatcaattcttggcatcagaaggaaatgaatacctagcaaaactgcatcactttggaaaccagtgcaatgaataactacccttaagctttcaacaacacaatttatagttgaattctttatacggctgacatgtcttggacgtcacacaagggattcagttacatcttgtattagttatctatggctgtgtaacaaatcaccccaaaatttagcagctagaaacaacacacatttattgtctcacaatttccgtaggtgaagaatctgggagcagctcagctggatagctctggctcagagtctctcacaagactgtactcaaggtgtcagacggggcagagtcatctcaaggctcagctgcgggaaggtctgcttcgcagctcacatatgtggccattgtcagatctcagaagctctgcttccaagcttactcacatggggctctccactggtctgtttcacgacgtggcacgtggcttcccctagagcaagcaatgcatgagagagtgaaagagagcacccaacagggaagcacaagttttctgtaacttcattttgaaaatgacatcccatcacttctgccatgttctcttcctagaagcaagctgataagtccagcccacagtcacgcggaggggattacccaaaggaaggaataccaggagactagaaggcaggacattgaggaccaccttgagagcctgcccactacacctctatactcagaggactgtgttacaggacagtttaatctctaggcaaacacagaaccaataagactataaagcaaatagttttacaagatcccagtgtggtctgtataggcatttatttttcaaaatttgattgattttttttctctttagctgacaacattgattttatttgagggagaaaaaaacccaccaacttaattattgatttcatttgaaaagactttttaacatttggagacttctggatatactttgagagtaaaaaaaagaaacagaactgaagattcacctactaaagaaatggctcttggccgggtgtggtggctcacgcctgtaatcccagcactttgggaggctgaggtgggtggatcacctgaggttgggagttcgagaccagtctgaccaacatggagaaaccccatctctactaaaaatataaaattagccaaatgtgttagctggcgcctgtaatcccagctactcaggaggctgaggcaggagaatcacttgaacccgggagatggaggttgcagtgagctgagatcacgccattgcactccagcttggacaacaagagcgaaactctggctaaaagaagaaatggctcttaattttacaaggtctgctttacagctttgtacgtataaagcatattgacacattgaaaggaaacaattgggaaatagtgaattaagaaaggctgtgtggctaaagaaaagatcacgtttaatttgatagaaaatggacttatagagatgaaaaatgctgtagaaatggaccgagacaaggcaacccaaccatttttcacttttacatgtgagtatggttttgattctattcaaactctggcttttctagaaaaaaaaaaaagagtaactggctagaaagttattcatttccctttatgcttgggaatgaaataaaatgtgttcctctttttgaagttgtgcgtgctttcctttccgtcgaggttacttatgaggcacatggaaataagggaatcaatttcttcctcttcttgtgctacaaacctttataaaggttgctataaatgtcataactgccttgtttcctgaaaagtaatttccctgtcattccgatctgttcctttgagataccatattattggtctatgatgatttctttaaagtgcgtcaaagtatgtggtttagtgtatttttcttatttcactgccttacagtgaatttctcactcacttcaaggcttgctcctaagtcaccaattattcataaaggattgcttgattttatcctcctaatgaaatgaattaaggttgaagaaaagcccttaacagagcataaaatgccaaaaagaccttaggaaattataagtccttccagctaaaatgtgaatttaactacaagaagaggaagaagcaggagaaagaacatgcttagaaatggtggcatgatgagtcctatagaggtggacagaggggaaaggaagagtcatagttcagcatttatggcttccgtattgtcaatatccatcagatgcattaaaaacaatcctagaaacgaacagaaaggccaggaatgcaacagcaatcacagtgatggtcctaaagcatctaaacctcctctgaccgcacagtgtctctgataccatgaagagtagaaggacagatgagcatgagggtaaatatacatatggaaaatgtttgtttttacttgtacaccaagaaatcactggctcaagctcacaaaatgcaatcatattttattacattttccagttattcaagactcaactataccagaaaacatcttaaaaaacacttttaaacaggatgtgaatgctttgtattacacagcttaatgtaattgatttagagtccatgaggaaaaccaattttccttttttttttgtgagacatattgatttaagggaaaaagcagtaattgattgtatctttggagatcaaaggtgagttgatgagagaggaaactggaaaggagagagaaaaagacatagatagaaagagataaaatgaggtctgaatataaacatctatttctgagatttaacttattatcactaagttttcattttccccaaatatttctcttcaaggaacagaaatcattcggattcagatctgtgtgcatgcaaagaatctgtatgtgtgctctttggctgagcccatttgtaaaataaacaagaaacatagagctgttaagaaataagatgagccaggacttacaggcacagatgtaccctcatcttttggatatttatactgagttttcttaagcactcaaaactttggaaggattttaagatgcttcatagagtcatttgtctaattggatatctaggagagcaatatctaggaagaatgcactcatttcagaaaacgaaaagttatttgtaattataatagcgggcttttctgcctctttttggaactggtagtgagcatgctggctcagttcctcaccctatgcctccttttcttgcttttaaatcttctccattatctcctttattatctgctatttattttactgaaggtaatcactgctttattaatcactgcttgagtaaccacagtgggacttgaaatgagcttgtttggattgtaaaagtcacaaatgctggtggacctcttgaaatttccctttttcccttcacttttatgagaacttccacgtgtagaaatgtcatgggcgaccagaggtggtttagtgtttctgaagcttggagaaagggaatttgaagatacttttcaggtagcatacacgtggtgtgtcacggtaaaccataagaaattctcattgcttacatgaaagagacttggtttgcttcaagagcaaaacaataaaaatggtttttgaaacaaaagtaatttaggcatccagtttgtttttcggaaataaaaactcaaatgtgaattcattttgaagctggtaattacattttgtttctaatgtagttgtaagaaagacttataaaaactggatttcaaatagcttttgcaaaataacctttgcgtttagttaaataatcagggccaggcgtggtggctcacgcctgtaatcccagcactttgggagactgaggcgggtggatcacctgaggtcaggagttcgagactagatggagaaaccccatctctactaaaaatacaaaattagccgggcgtggtggtgcatgcctgtaatcccagctactcagaaggctgaggcaggagaattgcttgaacctgggaggcagaggttgcagtgagcaagatcacgccattgcactccagcctgggcaacaagagcgaaactccgtctcaaaaaaaaaaaaaaaaaaatcagaagggaatttcaattttccttgaaatactactagatcttagaaagtaggggcgttatcaccgcaaaaacatgccaaattgtaaggaccatcgatgctaagaagagactgcatcaactaacgagcaaaataaccagctaacatcataatgacaggatcaagttcacacataacaatattaatcttaactgtaaatgtgctaaatgctccaattaaaagacacagactggcaaattggataaagagtcaagacccatcagtgtgctgtattcaggaaacccatctcatgtgcagagacacacataggctcaaaataaagggatggaggaagatctaccaagcaaatggaaaacaaaaaaaggcaggggttgcagtactagtctctgataaaacagacgttaaaccaacaaagatcaaaagagacaaagaaggccattggataatggtaaagggatcaattcaacaagaagaactaactatcttaaatatatatgcacccaatatgggagcacccagattcataaagcaagtccttagagaactacaaagcgacttagactcccacacaataataatgggagactttaacaccccactgtcaacattagacagatcaacgagacagaaagttaacaaggatatccaggaattgaactcagctctgcaccaagcagacctaatagacatctacagaactctccaccccaaatcaacagaatacacattcttctcagcaccacactgcacttactccaaaattgaccacatagttggaagtaaagcactcctcagcaaatgtgaaagaacagaaattataacaaactatctctgagaccacagtgcaatcaaactagaactcaggattaagaaactcactcaaaactgctccactacatggaaactgaacaacctgctcctgagtgactactgggtaaataacaaaatgaaggcagaaataaagatgttctttgaaaccaacgagaacaaagacacaacataccagaatctctgggacacatttaaagcagtgtgtagaaggaaatttatagcactaaatgcccacaagagaaagcaggaaagatctaaaattgacaccctaacatcacaattaaaagaactagagaagcaagagcaaacacattgaaaagctagcggaaggcaacatataactaagatcagagcagaactgaaggaaatagaggcacaaaaagcccttcaaaaaatcaatgaatccaggaggtggttttttgaaaagatcaacaaaattgatagaccgctagcaagactaataaagaggaaaagagagaagaatcaaatagatgcaataaaagatggtaagggggatatcaccaccgatcccacagaaatacaaactaccatcagagaatactacaaacacctcttcgcaaataagctagagaatctagaagaaatggataaatgcctcgacacatacactctcccaagactaaaccaggaagaagttgaatctctgaatagaccaataacaggctctgaaattgaggcaataattaatagcttaccaaccaaaaaaaaagtccaggaccagatggattcacagctgaattctaccagaagtacaaggaggaactggtaccattccttctgaaactattccaatcaatagaaaagagggaatcctccctaactcattttataaggccagcatcatcctgatactaaagcctggcagagacacaacaaaaaaagagaattttagaccaatatccctgatgaacatcgatgcaaaaatcctcaataaaatactggcaaaccgaatccagcagcacatcaaaaagcttatccaccatgatcaagtgggcttcatccctgggatgcaaggctggttcaacatatgcaaatcaataaatgtcatccagcatatgaacagaagcaacgacaaaaaacacatgattatctcaatagatgcagaaaagacctttgacaaaattcaacaacccttcatgctaaaaactctcaataaattaggtattgatgggacatatctcaaaataataagagctatttatgacaaacccacagccaatgtcatactgaatgggcgaaaactggaagtattccctttgaaaactgacacaagacagggatgccttctctcgccactcctattcaacatagtgttggaagttctggccagggcaatcaggcataagaaagaaataaagggtattcaattaggaaaagaggaagtcaaattgtccctgtttgcagagacatgattgtatgtctagaaaaccccattgtctcagcccaaaatctccttaagctgataagcaacttcagcaaagcctcaggatacagaatcaatgtgcaaaaatcacaagcattcttatacaccaataacagacaaacagagagccaaatcatgagtgaactcccattcacaattgcttcaaagagaataaaatacctaggaatccaacttacaagggatgtgaaggacctcttcaaggagaactacaaaccactgctcaccgaaataaaagaggatacaaacaaatggaaggatattccatgctcatggataggaagaatcaatatcctgaaagtggccatatgcccaaagtaatttatagattcaatgccatccccatcaagctaccaatgactttcttcacagaattggaaaaaactaaagttcatatggaaccaaaaaagagcctgcattgccaagtcaaaagaacaaagctggaggcatcatgctacccgacttcaaactatactacaaggctacagtaaccaaaacagcatggtactggtaccaaaacagagatataggccaatggaacagaacagagccctcagaaataataccacacatcgacaactatctgatctttgacaaaccagacaaaaacaagatattgggaaaggattccctatttaacaaatggtgctgggaaaactggctagccatatgtagaaagctgaaactggatcccttccttattccttatacaaaaattaattcaagatggattaaagacttaaatgttagacctaaaaccataaaaaccctagaagaaaacctaggcaataccattcaggacataggcatgggtaaggacttcatgtccaaaacaccaaaagcaagggcaacaaaaaccaaaattgacaaatgggatctaattaaactaaagcgcttctgcacagcacaagaaactaccatcagagtgaacaggcaacctacagaatgggagggaatttttgcaatctactcatctgacaaagggctaacatacagaatctacaaagaacacaaacaaatttacaagaaaacaacaaccccatcaaaaagcgggcaaagggtatgaacagacattctcaaaagaagacatttatgcagccaacagacacctgaaaaaatgctcatcatcactggccatcagagaaatgcaaatccaaaccacaatgagataccatctcacaccagttagaatggcaatcattgaaaagtcaggaaacaacaggtgctggagaggatggggagaaataggaacgcgtttacactgttggtgggactgtaaaccattgtggaagacagtgtggtgattcctcagggatctagaactagaaataccatttgacccagccatcccattactgggtatatgcccaaacgattataaatcatgctgctataaagacacatgcactcgtatgtttattgcggcaccattcacaatagcaaggacctggaaccaacccaaatgtccaacaatgatagactggattaagaaaatgtggcacatatacaccatggaatactatgcagccataaaaaatgatgagttcatgtcctttgtagggacatggatgaagctggaaaccatcattctcagcaaactatcgcaaggacaaaaaaccaaacatctcatgttctcactcataggtgggaattgaacaatgagaacacatggatacaggaagggggacatcacacaccggggcctgttgtggggtggggggagaggggagggatagcattaggagatatacctaatgtaaatgacaagttaatgggtgcagcacaccaacatggcacatgtatacatacgtaacaacctgcatgttgtgcacatgtaccctaaaacttaaagtataataataaaaagaaaaagaaagtaggggcattatgaatctacacaggtgataatatttcatagacacacacacacacagaacatcatgtaaaaactggtgaaatctgaataaagccaatatttgagttaatactataataccagtgtcaatttcctggtttgacactgtactccatttatgtaaaatacgtcattatatggggaagctgactgaagggtacacacacggtaactctctgattttctgcaacttcttgagaattcaaatttgagaaaaatgaagatcaggaacgtaagaagaaactgaagttatttagagctatgtcttgatgcttcttttctcatttctttcatacacacttcgcctaggagctttaaataccatatagatgctgacacacccaatttatatctcctgggtgtatctctcttctgagttccaaggtcatacctaattgcctgtttgacatcttctcttagtactatcacaggcatctcaaaagttttaaatccaagagtgagtttttaaaaaatttcagtagttttggggagtacaagtgatttttggttacatggataagttttagtggtgtttctaagattttaatgtactcgtcactgtacccaatatgttgcctgttatccctcacccccacaactctcccccacaacaggtccccaaagtccattatatcattcttatgcctttgtgtcctcatagcttagctaccacttatgagaaaatacaatgtttgattttccattgctgagttacttcacttagaataatgacctccagcatcatccaagttgcattcctttttatggctgagtagtattccatggtgtatatataccacatcttctttacccactcattggttgatgggcatttaggttggttccatatttttgcaattgcaaattgtgctgcaataaacgtgaatgtgcatatgtctttttaatatcatgacttatttttctttgggtaggtacccagtagtgggattactggatctaatggtagttctacttttagtttttcaaggattcctgtgagtgagtttttgagcaagttccctaaccccagatttcagctgcacgttgtacttattcaggttaagcctggaaatgatcccatctctaaccagcctctgctcccaacatccagtctaccaccaaacccaggcaattttaccctcaaagaaccgttggaaactcctaatgtatttttcttacagttttcattatggaaaatagtaagcatttacagaataaagataataccataatgaatccctgtgtagctatcacccagcctccaaaatattatattcaactcatgtccagttttattttctctcctctccatttcctccacttcagtgtattttgaagcctatctcaagtatcatattatttctgctgtaaatatttcaacatacttttctaaaaaatacaatattccttacttgaaaattataatttcttaatattatcaaatatctagtcatagtgcacatttgtatgattagcttatgatttttacagtatgttttttcaaatcaaacagtttcatacatagcaattggtggatatgtttcttatcctttttaatcatctcatttttttcttatttgtttattgaataaactaggtcatctatctgttagaatttccagccctctgcatctttatgatttcatctgtgtggctgacgtagagatgtaccacccagatcccacttcaggaaggtcttgttgcacagttgctgggaatgtgagcagcagacagattccctcttccagctttcagttccttcattatcttacttagtcatacggagcttctttgttttcttttttcttctttttttgagacggagtatcactctgttgcccaggctggagtgcagtggtgtgatctcagctcactgcaagctctgccttcccaggttcaagcgattctcctgcctcagcctcctgagtagctgggattacaggtggcaccaccatgcccagctaatttttgtatttttagtagagacagggtttcacagtgttggccgggctggtctcaaaatcctgacctcaggtgatccacccacctcggcctcccaaagtgctgggattacagacttgagccaccactcctggccagagcttctttgttttctagcatatcaaggtaattcaggatagtcttgtacatttctgccttaatcctagaattatctattttcttttaaggatttctaactccttataataggaaattatctttagggatcataatctggacacaaggagtgttctttattttctacgctgaaaacagtgatcagagccgggaaatttaaaaataggactacaagattatcacttaaacttatggaggctgagatgtgttaagttctgctgtctgcaagttggagacccaggaaagccagtggtatggtttgaaggcctgagagccagtgaactgatggtatagactctagtctgggtctgaaggcctcagaaccaagagtgctgaaggcaggagaagatcaatgttccagctcaagcaggcaggcagagagcaaattcaagcttcctccaccttttgttctattcagagcctgaatggattggatcatgcccacccatgttagagggggcatctgccttacttagtccaccatctaaatgctaatctcttctggaaacaccctcacagagatcacaagaaataatgtttaaccagctatctgggtaacctgtggcctagtcaagttgacacataaaattaagcatcacagtatggtctttaaatcagcaatggcttcacctgggagcttgttagaaactcagattttcagacccaccttcagacctattgaatcagaatttgaatttcaataagtttgagaagcactgctttaatttaacccattttattctttctcacacacgtgtagaatttttcatccgtattcattctttgacaccttttctccttctgtcatgatagcaaacattgattgtgccaacagatcaatgtgcaattgtgccaatttgcacagacactgcgtagagtgcttttgaaattatttaatactcaaagaccctttaaagaagatctgattattatctccatttttcaggagaaggaacagaggcttaggatagtcaagtaacctgcccaagttacacagcagtggtaaatccaggactgaaaaatagctggtccgattcatacattgtgtttaactactttgccatattaactccctgggatctttctaatccttcaatatttccataaaattctgtcttcttcagcccctttgctgaactcttgcagttattccattgcttctcagaagttgataaattatcctgtcttcattaatgagtcaattgttctttctctaataccccacacttgatcattaaggaatgctatgtctgaccttcaaaatattcctcgagtgtgagcactgctcattgtttagtccactgccacccagttaaagcaccattgtctcttgcctggaacataacatactcctctaattgcctcccgttcttgcttgtctacagtgtgtcaagaacagccatggtggtctcctgttcaaaatctttcaatggcttctaactgcgcttctagtgaaatccaaactaattaccaaggcttataaggctctgtattacaggtcagaaaacaatggactaagggcccaatatggcctgccactgatttgaaaaataaagctttactgtaacccagccatatccatttgtttacatatgatttgtggctggcttttcctttactatggtggcattgagtagttgtgactgagactgtggggcccacaaagcctaaaatatttcctatctaaccctttacagagaaaatttattaatccacattttagatggtctggccctgcctacctttcggacttcatctcctagctctctcccttgtgtgccctctgccctggccacaaagcctccttgctcttccttgaacatgccaagcttgcttctgccacaggatttcaacacaaaatatttactttgcctagaatgtttttatctctaagatccacatatctccctccctagcttcatccaagttctgctcaaatgtcacttcagcatggccttccctgaccaccctccctaacatccccccacccctattccatcaccttccactccttgccctgctttattcttcacggcttttatcaccatcctgcatccatctgtttgtctgtttgttaatttattgtctctcttcttccactaaaacctaagctccatggaatcaaggatcttaattgtttggttctctcttgtatctctagcagtcttagaccacataggtgcttagtttatttgttaaacaaactaacttcctaactagctattatgtgtggcaggtgctgtgctagatactaggtatacagaggtgaactcttgtttatggctctccagggcccacatgggacctggacgtggttctggaaagtgatcatcttgagcttcgtgtggcaattcctcaaagacctagaaccagaaataccatttggcctagcaatcccattactgtgtacatacccaaaggaatataaatcattctgttataaagctacatgcacacgtatgttcattgcagcactattcacaatagcaaagactcggaatcaactcaaatgctcatcaatgatagactggataaagaaaatgtggtacatatacaccatggaatactatgcagccatgaaaaggaacaagatcatgtcctttttggggacttggatggagctggaagccattatcctcagcaaactaatgcaggaacagaaaccaaacactgcatgttcttataagtgggagctgaacaatgagaacacatggacacagggaggggaacaacacacactggggcctgttgggttcggggcgtgagcagggggagggtaagcatcaggataaatagctaatgcatgcggggcttaatacctaagtgatgggttcataggtgcagcaaagcaccatggcacacgtttacctgtgtaacaaacctgcacatcctgcacatgtatcccggaacttaagaaaaaaagagatactgcaaaagtcatcaggagccagcacacctgccaggtgaaaccaggtgttctaaggcagggcatctatatttttggatttcagagaattaggtttttttctctgcattttcttcttactactggagaatgacataaggctgccaacttaattattttgtcatattggatatttcaagtaataaatctgctgtctgcaaaaagacaccttcaagataggtgaaaacatttaaatatgaactggatattagataatgcaatggaattattaatacttagtgtgacaatggaaatatgattatatctgaaaatgtcagttttgcttagagatgtatattggagtacacagggatgaaatggcatgaagcgtgggattggctttcaaataactgggcacagcaatgaagtgtggaaggtagtagtgttaccccattttacagaaaaggagagggaatctttttttttttttttttttaattttatttttatttttttatttttttattttttattttttttttttattgatcattcttgggtgtttctcgcagagggggatttggcagggtcataggacaatagtggagggaaggtcagcagataaacaagtgaacaaaggtctctggttttcctaggcagaggaccctgcggccttccgcagtgtttgtgtccctgggtacttgagattagggagtggtgatgactcttaacgagcatgctgccttcaagcatctgtttaacaaagcacatcttgcaccgcccttaatccatttaaccctgagtggacacagcacatgtttcagagagcacagggttggggataaggtcacagatcaacaggatcccaaggcagaagaatttttcttagtacagaacaaaatgaaaagtctcccatgtctacttctatccacacagacccggcaaccatctgatttctcaattttttccccacccttcccgcctttctattccacaaaaccgccattgtcatcatggcccatccccaatgagccgctgggcacacctcccagacggggtcgtggccgggcagaggggctcctcacttcccagtaggggcggccgggcagaagcgcccctcacctcccggatggggcggctggccgggcggggggctgaccccccgaccatcctcccggacggggcggctggccaggcagaggggctcctcacttcccagtaggggcggccgggcagaggcgcccctcacctcccggacggggcggccagccgggcggggggctgacccccccacctccctcccggacagggcggctggccgggcagaggggctcctcacttcccagtaggggcggccgggcagaggcgcccctcacctcccggacggggcggctggccaggcggggggctgatccccccacctccctcccggacggggcggctggtcgggcggggggctgaccccccccacctccctcccggacagggcggctagccgggcggggggctgacccccccacctccctcccggatggggcggctggccaggcggggggctgaccccccacctcgagagggaatcttttgatgaacttgccactcatcaagattacacaactagtaagaggtggagctaagagttgaactcagacaatatgaacctaaaaaccagtgttactaaatgagtcactccaatgaagaactttaactggaaatttggtgtcctacggagaggccgtagcatgcaaagatgccagctgtcctcattgatacttctacctacccttccatctgtgctcctgcctccattcccaccctcagataaggaaactcaggacctctagacatgtcaagaacatacttgagttgagagacagctctccatatagacagctctccatatagacaccaaagtttgtagccagatttttttttttcatttttttaatctttcatctccatggtgttcaatgaacccggaacataaacagacagatggtctgagtgggcgggcattttcacttaatgctaacacagttgccatcaatcccacctcttaaactaataccacctccctcttaaattaatgacgtcacaggtatgcagctccctgcagaccttggcaatcacatgggaatctttttggcacttctgagagataagatctatggaaaaaagtctcagaatctgcaaatcttttccagagaaaccttatcctgttaagaactcttggactgatagtctcttgataactgacagtgaaataacactaataataacaactaaaatgtaccgtgcatttattagtatcaggtaccatgctgagtacaaggattttcactccattctcatcaccactctgcttagtgagtaccttgtggctgttttggaggtgggaaaacttataaccagctaacgtttttacttatgaattctcttacctcaaatatttacgaagcatcttccatacttaaggcacattatgtacaacttattacagactttcaaggagcttttagccttaaaaatgggagaaattaacagcaacaataacacttacggagtttttaccatgtgtcagatgctgcgcctttcgatctttggttgtttaatgatttcaacagtctctgatatggattctcttttctgccccatattttagaaacagggaaactggagcatagataggttaagtgacatgcctcaagtcacacatgtactaaacggttagagctcagatttgaaccccagaagcctgtctgttgacctgcatgcctagccaccatgccatactggtcttccttatttaaaatgtacacatccccccacccatccccccaccaacacacactaaaaataaccagtaatgtgaaatcagcttagaataaattctattcacttttttttttttttttttttttgagatggagtctccctctgtcacccaggctggagtgcagtggcgcgatctcggctcactgcaagctccgcctcccgggttcacgccattctcctgcctcagcctcccgagtagctgggactacaggcgcccgccaccgcaccaggctaattttttgtatttttagtagagacggggtttcaccgtgttagccaggatggtctcgatctcctgacctcgtgatccgcccaccttggcctccctatttacttttttctacattcaatgagagcgtcaacatctctaggcaagaagtctcattcatatttctgtccccaggaccccagaccagtgactcagtgggtagtggtgttgattttgtaccccagggaacatttggtaatgtctgcagacctttctagttgccacaacgtggggcggggtgtgctactggcttctagtgggtaataacaaggatgctgctacccctgcagaacacacaagagagtccctgacatcagagaattccccagccccaaatcggtgatgccaaggctgagaccctgcctgagtataatgactaacaaagttaagtgttcaatatatagttttttgggtaaatttcaagtcgtataccaacaacctccaccaaacgacaatccctaaaagataacgtttgcttatctttcaaaacccagctcaagcagcaccacctcctagaagcctttctgacaccatcagacagcattttttttttctttttaaaaatcctagtaaaatattggcttattttactttctcttcacccttttcctagtcagctctgctcagggaatgcaaatgtcagcctaaggatgacactattaggccaaaagtatgtttcttcaaaagcaatgtgaaacatttcaaagttaaaaaaaaaaaaaaaaaaggaaaaacctgtgaattttccatggctttgtagctgggatttaaatcctaagtttccagtcacaagcaattatccagcttttaatgaaatgcaagccttctatctagttgctaaatctcctgagatggtttctggtttcttcagttctcagtagaaattcttttttttttttatagacaggtttattgaggtacaatttacatacagtaaaattcactcttgttaagtggatagttctatttgttttgacaaatgtacagtggtgtaaacatcacaaaaacaaactaagcacacacaaagtgttaatagtaaatgttttacattttaccacatttatttatttgtttgtttgtttatttatttgagacggagtcttgctgtatcacccaggctggagtgcgatggtgcaatctcggcccactgcaacctccacctcccaggttcaagtgattctcctgcctcagcctcccgagtagctgggattacaggttcataccaccaggcccggctaatttttgtttttttagtagagacgatgtttcaccatgttggccagcctggtctcaaactcctgacctcaagcgatctgtttgccccggcctctcaaagtgctgagattacaggcgtgagccactgtgcctggcctaatttttatttttatttttttttttcaagaagcctgtcttgcttttgtaagtattttctatctggtctatcaagacataatttacatataataaaatttaccctttgcagttctgagagttttgataagtgtatacaatcatataatcactaccaccttcatgatgaagaacatttctatcacctctaaacattttctcatacccaggtgcagttaagccccttccctcttcacacgaggggaagaggcaagggccctgagaacacctgagagcacctgacgggtgggtttctgagctggtacttttgctttttccagaatgttatagaaatggaatcatataacggtgtgtggtatttcatgcctaacttcttttgcttcacgtaatgcctctgagtttcatctatgttgttggaggtatccatagtttgttctttttattgctttttattccattgtatggatgtagcacagcttctttaattcatgagtcgataggtatttggtttgcttccagtttttggagatgatggagattatgaataaatctgctctaagtatttgcatacatggtttcattgggacataaatttttgtttttcctggataataggagtgagattgttgggtctatggtaagtacatctttaacttttataagaagctaccaaactgttttccaaagtgcttgtgctgtttcaccatcccattagcaatggatgacagtcccagccacttcacctctctgccaccacttaaaattgtcagtggtggccagacatagtgactcatgctggtaatctcagcactttgggaggctgagacgggaggatcacttgagtccaggagttcaagaccagcctggacagtacagtgagaccttgtctgtacaaaaaaaaaaaaaaaaaattagccgggcatggtggtgcatgcctatagtctcagctactcaggaggctgaggtgagaggatcatttgagcctgggaggaggacactgccatgagccaagactgtaccactgcactccagcctgagcaacagagcaagaccttatctcaaaaaaaaaaaaaaaattgccattttcatttccctgatgactaatgatgtcaagcatttttaatgtgcttatttgccatccatatatcttcagtggttatgcgcttattgaaatcttttgctcacgttttaatttggctgttttctgtgagttttgagagttctcgatatattttagatacaagcccattattagatttgtaatttgcaaatattttctcctagctgtggcttgtcttttcattctcttaacattctttcaaagagcagaagcctataattttgatgaagtccaagttatcaattttttcttttataatttgtactttttgtgttttacataagaaataattgtctagtaccaggtcataaagattttttttctcctaagttcccttttagcagttttgtttttttttagattttacatttagagctatgattcatgttgagttttgtgcatagtttgaggtataagtcaaggtctcttatttttgtatatgatgaccgactgttccaacagaatttgttaaaaagacaattgtaagttgcagggcccgctcaaaccgagtaaccattgcttaagttgttttggatagcacagggccaaaattgcaagtcatatagcccagacatgccaatgaaaaacagctttaacctcttagtatcaccagccaggcaggctggctgcattggcagcacctgggactagttaggaacgtcatagagcttgacccacctccagatcagggagacaaatttcagcgttgcctctacctccttgccagtcaacttgcagtgaagctttttcttgtctcaaaagctggtgccataataggggcttctctgcacgccaggtatgaattgactgctcaataacataatcattattcattaaattacctttgcaccattatcaaaagttaactgacaatatgtatgcagatttatttttattctgtattctgtttatggcagctttgtatctactttcttgagcaaacacatgtaccaaacacagttaacagcactttacaaataataactcatttagtactcattacaaccctcatggcatctgcttctaatggttctattttcttggcaaggaacctgaggcacggagaggctaagtagatttcctagggtcacacagcctgtaattgatggcacttagcttctattttcttctctcattgtaaatcatcctttagtataattgtggatttggttgtctgaatttttcactagttggtaagctgtttgagggtagagattgcgtctttaagctttgtggcctaagcacttagctaatgccagccttggagaacatgctccatgaaggtgtataaatgaacgaatgaatgaatgggcaaatgcacaaagtatggacgaaatgagtgctctgaaggttgtgctctttggaacctctgccactggcatcatttcccaagtgaaaaaaaaaatggctgccaacaacgcagacaaaaagctaagtgaaaatgaatacaggatctgtctctaataaaaacagaaaaagaattatgcttagaaatattcatcactggtgcacgatgatccagatttcaacagatcaaccttgatatgctgataagagactatttgtggaaagactgaaccttggaggccacactgcagggctccaccggagatatgacaattgccaacatctgtatgggaattaagggatggagacatgaggttaattgccagggctttaagaggcaggagaggaggaggtggaagaattataagaatcatggtgctgttagtgggaacagccaaggctctggagttggcaaagaagattaagctgcgggtgacaggcaggtggagggaaacccagcacatcccactggctcaaggtgacctttctttcttttcttttccttttatgattaaaggacaatcatgcttgtggttacaactgtcaacagaaaaggagggtagaaattaaaaagtctccaaacttccttggttcccctgagagagttcataagattgactttgattccagacatttttctggatacatacagtgatctatcataaatatctaactagcaggcaaatttttgtgtttccctcacctcagggagtcctcttacttccaagtctttccaaagtttctcatattccagaaaacatattttctaattttatttttattttttgcacaacgaacagctctttgttgcttactttagctgcagattagaatcatctgaagatttttgttttatttataaatgatgactgcagaagcctcagtcccagagaatctgatagctttgtttttgggtatggcctagatattggcgtgttccccacatgattctactatgcagccagatggaagtacaactgattctcaagtcaagttgcaccagaattactttatttcccttaactatggttattagccaagcccctgattagagagtctgattcagtccttttggaatggggtcagggcagtggtatttttttttctctgttccccaggtgcagctatggttgactcactgctgcctgaagcttttgcaatccatgctaatgggagatgtgttggaggggaaccttatgcaatgtgtagaaaaggaggcaaagacgttgaacccagacctggtcattctcagcaggagttcacaattgcaatttgtggatgctgtaagcatctctgtgatggtcaggagtatctacctgcaagataaaggaaaaagaattttactaatgttacatgattggctacttgatgcaggatcttacctggaggaacatcattcatttaaataaaaatgaaaacaatctgctgtgaatcactgtgttcaatcagtgcttctcaaacatgaatgtgcacaggaatcatcaggggatcttgtaacgatgcaggttttgatttggtggatctgggttggggcctgagatgctgcctttctaataagctcctggggaattgtctcgggatgacaatttgagtggcagggtatcagttcactcaaaatgtggttctgatgtgagaagcttgaatatagttattttatgcagtaagagagtgaatcatatttcaaattgactttattctctatgtatgattttaaatggatgtatagctaacataagaaatgaacatagtgaaccattcaattgtacagtttatatataccatttggcccaaatgcttttttacttacttttaaaatcttttcattaagaataaagttttgctttgagggtgggatggttggtaattttgtattctggcacatatacaatcctttagggattagcgttcataaacatagatagttctctgaaagcattgaacaggtggtagaatgaagtaggaagccggtgactgagaaaaatctaggctggttagcagatgccttcgcttggaaaatagggataatattcatacctacctcataaagttgctgtagaaataaaatggggggatacatatgcaaagcatatagcatagtgtctgctccataaaagggactccataagctatgccagttttatcactatgttaccagtccttcaggaggttatgggatgcttagaagtgtatttggaccctttcaaaacaaaatagatgagtacatgtttttcttcattaacacctacgcatttataattttatgtaaattcatgcatactaacatgtcatgcatgcctttctttagtttagtctttttattttactttgttgcttgggtcctccatcctcacatatcagcggcccgcctatgttaacctgggttcatatctagtatgtacttttaacatttattattattttattattttttctagtgtatatttttaaaacaaaaaaccctacacaaatatgcaaagtataaaatttgccaagtttttacatgtatatacacctatgaatgaatcaccaaaatcaagaaaatggaattatttttcactccccaaagtttcctcatgcacctttgtaacgcctccctatcatcccttctcaccctcttacaggtcccaggaaacactgatctgctttctgtcaccaaagagcattttgcattttccaggattttataaaattttataaaatgactcatagtatgtaatgatttttgccaggcttatttcatttagcataattatgttgaaagctattcatgtcatgatcatggatttagatagacctttcttctttacatatataggcatttaatactataaattttcctctaaatattggtttagcaaaatcccacaaatgcattttgttgtgttttcattttcattcagttcaaaatattactttccattttgattttttttcctttggtgttattaaattttcaaatatttgtgaattttccagaaatcattttgatttctaatttaattccattatgatcagaaaagaatgttttgtatgaatgaaacccttttaaatttgttgagccttgttttgtagctcagaatatgtctaccatggtaagttttcaatgtgtactctgttgttgttggatgcagtgttttaaaaaaaacatcagttagatcaagttggttgattgtcttcaaatcttctgtattctcactgattttctatatacttgttctagcaatcattgagaaggatattgatatctttgactaattgtagatttcaattttctgataatttttatcagttattacttcatgtattttgaagctctgatattgggtatacaaatatttagaattgttatgtcctttagatgaactggcccttttatcataatgaaatgatcttctttattcttagtagtattctttactctgatttagctatttcaactttcttttcacttgtgttagcatggtatgtttttttctatcctttttaatgtatttgtgtcattatgtttaaagtacatttcttgtagggggcatatatttgagtgttgacttttaaatctaatgtaacaatctgctttttaattggactatttagactgattgcatttaatgtgattattgatgtgattaagttaaatctattatcttgctatttgctttccattgtaccatctattccttgttcccttttgctttttccctgccttcttttggattaattgtatattttatatactttcacttgtcttctttattgtttcattgaccatgatattttttgttattttagtggtcattttagagtttacaattcacatttttcacttatcacagtgtactttcaggtgatgaagtatactttacatgtagtgtgagatctttacaatagtctacttctatttctccccacctgacttttatgatattgttatcatgcatgtaatgtatacatatattataaaaactagagatatatacacaaacacacacatatagtgtgtagagctatatatgcttataaataatgtttataaaatataatgaaatatataaatataaaatattgcattatttttgtttaaattataaatattttatgcttagtaatttttattttattgcatgccagatattgtgcaatatctctttttgggtagtgaatatttttgttttcaacaaaaattctcaagctttgttctaggacacagttatttatactagttaccctttatctgcagttttgccttttatggtttcagttatctacagtacagtacagtgatctctttgtatctgtgggggattggatccaggacccccaaaagataacaaaacccatggatgctcaagtctcccatataacttggcctagtatttgcatataacttatgtacatcttcctttataccttatctctagattacttataatacatagtataatgtaaatgcaatgtaaaggttgttatatgatattgtttttccatttgtattttttattgttgcttttcatttttttaaatttattttttgcatattttaaatttgcagttcactgaatctgtgtatatggaacctgtagctacagaggtctgactgtacaagaaattttgagagaaggggagagagagtgtattcacataacttttattacagtgtattgttctattttattattagttattgttgttaagctcttactgtacctaatttataaattaaattttatcactggcatatatttatagaaaaaaattctatatagagttttataccatccccagtttcaggcatccactgggggtcttagaacatattctttgcaggtgggagaattcctgtcctggaaagcagtaggattcctgcagatttcgcttttcagatctgttagcctggagaagttatccgttttgggctcattctttcccatttctgagacaagaccctctgtgcactctatcgcacgccccatgaatcatgaggtttcccatttttttctggtggcaatagagactattccccagccccgcatgagtgctgagaacagtaatctttaatgttcttagatgattttctctttggcctcaggtagtttcctaacatgtgtgaactgatttttttttttaataaatgaatatttgagggaaaccctcagcaggtcttccaagttctttttctgtgcatctttctcttctgagaaagctactgtgtcctctgagctttagccaccttggtctccccaagtatccttaactcagggagtctgcctggctcccgtaggcgcctcaggtaccagggcctggccagtctctcaaggcagttagctagaactatagtgtgcctcaccttgcttgttttccatctctcaggaccattgtcttttgttgtcttatatccattatcttgaaaagtattgtttcatatattatgtcctacattattatttttttggttgttttgggcaggaatgtaaatttagttcctggtactctatcttgattggaagtagaattacagttccttcatgctcatgtctacatcctcgtataactacatacattcatgtatacacacatgcacacatatataaatgaacatttaattatctcattctactaaaatggaattgtatacacatattgcatcttaattttcttacccatagatgccttgaaccctgtcctccacatcaatgggtataattataattcaatcactttaatgtccatataatattttgtaatatggatgtgacataattttaaaaaaccatctacttatggacacttcctttgtttctaatatttgacacttttaacaatgtagtaatgcctctctccttctctctctctctctctatatatatatatttaaaccatagcatcttaattcaacctaaaccagaaataagattggtaaacaactattttgacatgaagatactgtttttatttttttaaacaaaattttttagatcataattgtagtgatcatgatgatgataagcatgtatagaacctatgtccaagtgctttgcatgtattaactaatctaatgctaaccaacacctttgaaattctataaggtattatcactattttacaaaaaagaaactgagtcagtaaaaggttaaaccaactgcccaaagtcagacagccagtaagtaggggaggtgggttttgaagccaatctagctgcagactttgaagcatagtagcattttcatgttgttgtctgaactgtaagttgtttgattttacttaataatataccttggacatgttttcatattagcacttacagattatctcattctatcttttagctgtatttgaatataccagaatttatttccctagtcttttattgttggacattaaattgtttacagtgttctgcttttatacacaattttgcaatcaacatccctgaatatatatatgttagtttatccttgggaatttgtgtatctgatgaataaatttctagcaatagtttattcatcaaagagtatgtgcctgtatatttttagcaggtgctcaccgccttctcactcacacagatgaaatctattaagtttataaatgtaaactttcaataacagtgtgactatgggacagtgatatttaagggatattttaaagggtggtgtagacatgattcacatgttatttcacaatgacatgtcattgttttccttcttcttttcagcttcttctctttcatatttcagtatgaaatagaaaatccaacaaccctgtttccattgaaaattgccaaataaatcatcagatctttctttttagaggcgttgccttcactatctggatgtaataattataacaactgggaacctgattcgggctgttggcttctcccgacatgttcagtcataatggggaaactaagaacattttctatttccttccagcatacagcagtattaagaatcctaggaaactgacaacttcccacttctatagcatctgaaatacaacccaaaagaaactgagctcagatgtggcctcagggttggacatttgaaatggcaatgcatgggtcttggctcacagctctcagaatcccagctttgtatgtgtttcccttggacaatgtatgtgcttagtagatgaggaggaaaccgcatgcttctctccagctcggcggagaaaaatatttcttctctttttccttctaatgatttcattagtcatattgtttacattttactgaaaaaaattatatcccccctttaaaatacttgagcattgggcagttcatgtaaataataaatctgcctaagtttacaaattcttgactagaaataataaacctgggcgataatagtaaccatagaattgaacagcttttcccagaggggcactcagtggggaaatttggtaattatagttagcaaatggccctttggcaacagaatgtcttttttaaaagctcaacaaaaataattctggggaaaataaaaaggcataatctgtgaaatgctgaatgtaaactataccgcatgacctaattaagaggactgctatggaggatttttccaaaatactcaataaaatgagccttattatggcagtttgggggaaagtaagcctatttgtttcggaggtgcaaatgccagataatataatattaaaagaagatagattcaaaagcaaaagagattactgtgaagagcagataaatgaagtgtaagcacatttagtgttaaagacaatttttttttcactgctacaatatctggtactgcagacacatggaaatttaaaggtttttcccccacagtggaaacgttatgcttagattgcatgttgctcatctaatatccttgatatgagctttaataatattgaaagacttgctattcagctgcctaacagttctaaagtggatatctggcctagccaccagattgaagaatgtgaaagagcttattcagccacgttaatgaacaaagtcaatgactactccgttacttcctgtcagttcactcatccctccatccctcctcctgtctacgttttcattaaaatgttgattgaatattccctacgtctctggcactgctcaaagtgctggagctacagcagggaacaaaataaacaaggttctgttcatatggaacttacattttagtggatgttgggttggagaaatatgacaaataaagataaataagaacataatttatcaggtaagagtagatgataattaggaagataaagcctgtgaaagaaataaagcatgatggaggggtgtgtgtgtatgtgtgcgcgcgcatgcatgtgtgctactttaacaggagcaagaacaaagttaaggaataaagaaaaaaccttaaggctatcttggaggaagatcactggagatggtgcacaggccctgaggtgggaatggcttgggatatccaagagtaacaaggaggccagctggactgatgcatagttttcaaggagtagagccataggaattatgagcagagacatgtctacaagcatgattatgtacttggggccttacaggcaatggttgggcagccaatagagagttttgagtattttagtggcttgatctgatttatgttttaaaatacatttggccatccatatctgtgcattccacacccatggattctgccaagagaggactgaaaaatattccaggaaaaaaattccacaagttccaaaaagtgaaacttgaacttgtcacaagggtaaagtattgtgcaggtcttgtgttaggtattataagtaatttaaaggatatgggaggatgtgtgtaggttatatgcaaatgctatgccattttatataagggacttgagcatcttgggattttggtatatgccaggatgtggggattggaaccaatctctcatcaataatgaggaacaactatactccctctggcacttattggagtgacggtgatattctataccttgattgccatggtagttacacaactgtgtgtgtttgtcaaaacttatagaaatgtacacctggaagggtaaattttactggagataaattatagctcaataagcctgaattttaaaacgttctttatatctgctgtgtagatgatacaggggccagaatgaataaagacagactaattaggaggctatagcaaaaaatcaggcgaaatacaatgatagttttaactaggttggtagcagagattttggtgagaaatatcacggtttagggtaattttaaaaaatacaaccactgaaacttagtgataagtataaattcttctcttacttcccactcgtccaaatctcagcaaatgctgccaccacaaaccagttaactcaagccgtaatccaacgaacatctttgattaatgcatca

SEQ ID NO: 63 - DNA, 149111 bp, Homo sapiens
acttattcagaaaggaagacagttacaattcttgggtcttctgagagatcattataacttgaaaatattacacaagggctttgctatattagatacctgccatgttcctaacacaagctcccattttctgactcaaatctcattttggaacacattccactcaaattgaggttctacccctaagagttctttttcaataaagaaagctgagttaataaatcacaactccaaaacttttcctcacttttcttagactagaaatagattgagtgtgtcgaggttttatggctgagtacattggagggctggctattctatgctgaactggtttacttgattaagatggggatttggatgagtcaccggacacctgtccaaagatgagtaaaacacattccttcattgtcttcccataaataactcaatcttctcctaactgagccaatggataggctttggatgcccaagcaaaacaaacacatgactgttaaaaaatcacaacctcaaaatggccttagaagcctatgaccaataatgagaatggtttctccactcaggcgcaagtagtaaacagtttctcccatatgcaggaatattgacgactagtttaccgcctctgggcacgtaactttcaggtcctggttcatgcatttgctggaatgttccctgggccatggagcccagttctcctggcatctggcatctcccccacactctgctcccccagcacagcacttggcatcttgcattgcaattgcaggtttatttattcacttctctcactggacagcaaactccaccagggccgagactctgtgtctcgcccttcactgtggtccctgtgcctcacctgttcctagtacagtgtcacactcagtaaagagcagatgcctggtgcatttggagacttattttaaattatacggaaagttattcaaccggcttcttgaactggtgaattttggaaagtgggtgtttgaagggaaaatgtttaaactctgaaagaaatgttggaaataagctctttgaatcaaaatgtatagaaaacacaagaatgctgacagtaagagcctaaaacacatgatgactattatcttttcccaattttaactctccagagtgttcagcggtgcccagccttcataatgtaattcttcgtagcaccctggatgcattaaaaccatagattaacgtgatacttattttcattaaggaaaataatttacgtacagtgctcagagtagagcctggcacattgaacattttcaataaatgacagcaagtgtaattattagcacttcggaagtgcaaagttgcattgtattaagacaaatatatttggagctcatccaattttttcctggctctgaagtctgctagtggcacttaactttattcccaagttttgaaaaatattgttatttaaaaagtctgttaaccaaggaaatgcatgccctaaacctataatgtatcaagttttacttccttcttcttttaaggagttcttttcctgccttgaatacaaacaggctctctcaaggttaaaagcaaatgctctttttagtgtcaaaaagagcttgcctttcttcgctcaggaaaaaaagcaactgattccaggataccttctttgaaaaccaacacaaaaaaaccccccaaaaaacaaaaaaaaaacccaaaacccctagtttttacaaaggtttattactcctacttgttggaaaagaattactacataaaagagtctgcccagagctgtaaaatctccttattcaaacacacaccttagagcaaaagatggttaaatatcaattcaggctattaacagtaagggacgaaatgtgttccaacaaaactctgcatgtcaacaaactacagagactaggtaacatcttttaggaatcatttttattccactaatgccttttcctccagaatccactgatcgtaaacgcaacctgtctacttccgcctttgaaaaatggatggacaaattcatctgcatgtaactcacctcctcttttcttttacataaaacagatgccacagctgttattgttcttcacacagaagtttctacccagagaaacatcaggatgacactctgctgcaatgtgctatttgttctagaggggtcaacagcttgccaccttgcctaggcccagggtgactgcatatgtgcagtggtcttatcccattagcgcccccgagcatgcattcagaaccaagtggatacaccttggcacacttaccttccctgcagggacatcatcggactgccctgataagccaggaacctcatccaccttgtcttgatgctctgccctcttggcttcctgttggctgtcacctggcaccttttcctgtcccttgtccagcttgaagaatttgtcaaaaaagctggagtccttgggcttggagggagcttctcctcctgctccccctgtctcaggtgggagaagcgtgggatccctggcggcagagaggaccttgtcttgggccggggcgtgccctggggttttatctgtgtcctgccccggtccagctgccaccggaagtgtccagctctcacttgggtctttgttcgctggagctttattggagctgacatcaagcttcactgatccaagggatgaatctgcggcttggtctccggtacgtcctggtacaggccgagagagcatcaagaaaaaacgagatttagcagctggtgcctcgggtttggcctctttcccaagattctttccgttggcatccgcaacagcacttatctccgttgtctcgggggaagaagtggccacattatccgtcttgacacttattcccaagtcgactgtaaacacaaacataaacagtggttattcagccaagccgggaaattcaggcactaataatggactccagacattttttatacaaaagccatactgcatactggaactgtgttgttctctggtcattctgaaaggcagaagttagctctctacatctccttggaccctgcttttcttgggagaggagaaggcaaggttggtgaggagggaaagctacttaatggaaagtcactagctgccaggtgtggaatgagtgatattcaatgttaattaatcttcttttatctgtgtaagaactccgtgagcagcatattgtcatgatgtcaactgggaggcagtacagcagttaggagcttgggttctggagctagaacaaggtttctcaacctcagcactactcacatttgaagccagattattctttgttagggaggctcatcccgtgcctcataggctgattagcagcatcctggcctctgcccactagacgccggtcacatttcccagtcatggcaaccaaaaatatctctaggcattgctaaatgtcccctggaggacaaaatctcttacgtttgagaggcactgagctgaaatgtctttttgaatccagattatctaattttctgtgcctcaactttctggtaaaaggagacagataataaatctcgtaattttgttaggaagattacatgagttaatagttttaaagcaagtacaatagcacctggaatatattaagtgcttaataaatatcacaaacattagttatcattattcatgagtgagaaaactgacagtcagagaggtcagtacaccctcccctggctgcccagtaagctagtaagcagcagagtctggcttcaggcagaaatctgacttctaagttcatgcgctctctgtcttaccagggacttgtattagcatagactgttaagaatatgggaagatttttaaaatacagtactcagaaaatttctctttgaaaggctggaagagcagatatccacacaagaaggcaaattagacctcaggccagtgtggaattaaaggtgtagggttatctggtcaagactgtgtgtgtggatacaggctccaacccctccaggcaagggcactgtttccaacatccaccctttctcctttgacctctaccttgacctaaattaactataaaaggtccttcttttctaggaccctactataaatcagtgaaatattcaggaaaaaaagaacaccaagaatgttgggatcccagttaaagatcaagattctctactgataagctgtgtgatatggagtaaatcactaaagatctttgaatctcttcatttgtaaaatgggaatattggtagtcctactgcagggttgttgtaatgcttaaagaagaaaagtcatgcaaaggatctggcacaacgccttttccataataagtgcttagtaattgacagatactgtgataacttttcaggtttctctcatgcctttgacaacattgcattttgcttgctctatctgtagtcagacacttcttaatatctgtttgcaggaagacagaaaaataaagggaagaattgagatttctttgatctattcatactgctcattaatatgtagtgagaaatacatacacacacacatacacacacatgcatccattagcaattgtttttgcccaactctagtgtctcgcagtgtctagactaaacaacaaacaaaaaaggggggagagtgagctggattaagcattgaggcacagtgaagaaatggtctggggcaagcccagggatgaatgttaggggtttctcataaacctgaacctgaagaaaatcaccctgccagcatattgatcttctagctcttcttaacctttttttctgtgattcaggaattcataatgatagaaaatattatactaaagaagaaaaaaagagggagaataagtaagtgatagatggatgcatcagggtgtaaagttagcaagtaaggctgttgaagtgtcagagtgaatataaatgaattgtgggaatggtccatgccaggagaagagggtatggttgacaaaaagggaaatgctaagattcaaaacagggaagggcttttcaaaatgccaagagcaccaacttatatctttcagtttaattcctctcttccttacccactggctggaaagcaaaggagctagtggtaagtaagagtgttatagccagagaaaaagtcttcaaaaaacacaaagtactttccatggacaaccttttttattttaaagtgccaatatgttgctttgaaaaagaataaattccttacatccaggtatctggactagacttcagtgcatttagtgattatagcaaatccaaacagtagcttttgatatcagagaatgggtaaagtgtttttgacaatttctaagaacttagagttcttcggtgatacgttccatgcaactgaagctctgctctccaaatttaggtgggtacatacccaagtccatcacctggggcttctatttcctttgctcagatgctcacctcctaggtgggcacctgacataagatagactaataaaaataagtcctgtaacttttgatactcctattaaaaaagagttgcaaaccaataggaggtacacttgagaatcagcacaaatgaaagtagaacctggaaatccaggaagcagatacccaatcatgtcatttaaacatttagatccagctgtgcctgaagctgaactttagcattacataagccaataaatcactcttccccaacttacgccagttgaaattgaatacatactcagtgactttgagagaattccagggaattggtcagtccctgtttcacttgtaaatacacagcaatcaagcctaccaaatctatgattgattggggtgtctgaaagagatggagggaatggaatcaacctgaaaaacatatttcaggagttcatccctgaaaacttccccaacctagctagaggggccaacattcaaattcaggaaatgcagagaaccccagtaagatactccacaaaaagatcttccccaagacatcatcatcagattctccaaagttgaaatgtaagaaaaaatgctaaaggcaactagagtgaaaggcccggtcacctaaaaagggaagcacagacttacagtggacctctcactggtaaccctacaagccagaagagattgaggaccaatattcaacattcttaaacaaaaagaattccaacccagaattttatatctgactaaactaagcttcataagcaaaagagaaataagatcattttcagacaagcaaatgctaagggaatttgtgaccattagaccttccttgcaacagttcctaaaggaagcactaaatatggaaagaccattaccagacactacaaaacacactgaagtacacagaccagtgacattgtaaagcaactacataacaagtctgcaaaataaccagccaacatcatgatgacggtatcaaatcgacacatagcaacactaaccttaaatgtaaatggactaaatgatcccattaaaagacataaagtggcaggctggataaagaaccaagaaccattggtatactgtcttcaagagacccatctcctatgcagtgacacacataggttcaagataaagggatggggaaaaatctaccaagcaaatagaaaacagaataaaacaggggttgcaatcctagttgccgtcaaaacagactttaaaccaacaaaggttaaaagaaaaaaatatgggcattgcataaggataaagtgttaaattaaacaagaagatctaactatcctaagtatatatgcaccaaacacaggaacacccagattcataaagcaagtttatggagaccttcaaacagacttagactcccacacaatagtagtgggagactttaataccccatgacaatattagacagatcattgagacaggaaattaacaaagatattcaagatctaactcagcactaaatcaaatggccctgatagatatctacaggactgtcctacttgaaaccatacaattacatggtaattgaatgacctgctcctgaatgacttttgggtaaataataaaattaaggcagaaatcaagaagttttttgaactaatgagaacaaagatacaacataccagaatctttgggacacagctaaggcagtgttaagagggaaatttatagcactaaatcccacatcaaaaagttagaaagagctcacgttaacaatctaacctcacaactacaggaactagagaactgagagcagaaaaacctgaaagctagcagaagacaagaaataaccaaaattagagctgaactgaaggagattgagacatgaaaaaccattcaaaagatcagtgaattcaggagctgttttttttttgaacaaattaataaaatagaccattagctagagtaataaacaagaaaatagaaaagattcaaataaacacaatcagaaacgacaagggggatattaccactgaccccacagaagtacaaacaaccatcagagaatattatgaacatctctatgcacataaactagaaaatctagaagaagtggataaacttctggacatatacacccttctaagactgtaccaggaagaaattgaatccctgaacagaccaataatgagccctaaaattgaggaagtaatacatagactaccaaccataaaaaaacccagtactagatggattcacaggtaagttctaccagttgtacaaagaagagctggtacagttcctactgaaattattccaaaaagttgagtaggagggagtccttcctaactcatttgatgaggccagcatcatcctgatatcaaaacctggcagatatacaacaagaaaagcttcaggccaatatccttgatgaacttcaatgcaaaaatcctcaataaaatactggcaaactgaatccagcagcacaccaaaaagcttatccaccatgatcaagtagaatgcaagttggttcaacatatacaaatcaataaatgtgactcatcacataaacagaactaaagacaaaaactacatgattatctcaacagatgcagaaaaggctttcaataaaattagacatccatttatgttaaaaactctcaataaactaggtattgaaggaacatacctcaaaataataagagccatgtatgacaaacccacagctaagatcatactgaatgggcaaaagctggaagcattttctttgaagactggcataagacaaggatgatctctctcaccactcctattcaacatagtattggaagtcttggccagggcaatcgggcaagagaaataaataaagcgcatccaaataggaagagaggaagtcaaactatccttgtttgcagattacatgacattatatctagaaaaccccatagtctcagccccaaagcttcttaagctgataaacaacttcagcaaagtctcaggatacaaaataaatgtgcaaaaattactggcatttccatgcaccaacaacagtcaagccaggagccaaaccaggaatgcactcccactcacaatcgccacaaaaagagtaaaatacctaggaaaacagctaattagggaggtgaaagatctctacaaggagaataatgaaccagcgctcaaagaaattagagatgacacaaacaaatggaaaaacattccatgttcattgataggaagaatcaatatcattaaaatggccatattgcccagagcaatttatagattcaatgctatacctattaaactactgttgagattcttcacagaaccagagaaaactattttaaaattcatatagaacccagaaaagagcctgaattgctaaggcaatcctaagcaaaaagcataaagctgaaggcatcatgctacctgacttcaaactatactacaaggctacagtaaccaaaacagcatactactggtacaaaaacagacacatagaccaatggaacagaatagagaacccggaaataagaccacacacctacaactatctaatctttgacaaacctgacaaaaacatgcaatggggaaaagatttcctattcaataaaaagtgctgggataaccggctagctgtacacagaagattaaagctggaccccttccttacaacatatacaaaaatcggccgggcttggtggctcacgcttgtaatcccagcactttggaaggccgaggagggcggatcatgaggtcaggagatcgagaacacggtgaaaccccgtctctactaaaaatacaaaaaattagccgggtgtggtggcaggcgcctgtagtcccagctacttggagaggctgaggcaggagaatggtgtgaacccgggagacagagcttgcactgagccgagaccacatcactgcactccagcctgggcgacagagtgagactccgtctcaaaaaaaaaaaaaaaaaaaagaagacatacaggtagtcaacaagcatatgaaaaaaagctcaatattactaatcatcagagaaatgcaaatcaaaaaccacaatgagataccatctaataccagtcagaatgatattattaaaaagtcaaaaaataagatgctggtgaggtagtggagagaaaggaatgcttatacactgttggtgggagtgtaaattagttcaaccattgtggaagacagtgtggcaattcctcaaagacctaaagatagaaataccattccacccagcaattccattactgggtacatacccgaaaaatagaaatcattcttttataaagatacatgcatgtgtatgttcattgcagcactattcacaatagcaaaaacatggaatcaacctaaatacccaccaatgatagcctggataaagaaaatgtggtacatatacaccatggaatactatgcagccataaaaagaacgagatcatgtcctttgcaggaacatgaatggagctgaaggccattatccttagcaaagtattgccgaaaaagaaaatcaaatactacatgttctcacttataaatgggagctaaatgatgagaacacatggccacacagggggaacaacacacactggggcctattggagggtggaaggtgggaggagggagaggatcaggaaaaataattaatagatattatttcatcacccaggtattaataatacctatttcatcacccaggcttgatacctgggtgacaacaaacccccatgacacaaatttacctatataacaaacctgcccgtgtacccctgaacttaaaataaaagttaaaaaaatgcaaaaagatgacataccaaagagatgttacttttcatttttaaaaaagtcaaagaatttaaggaaaattaaaaagaaatcaagaatgacagtagcagctccaaaatatttagaaggtagagttgaaaattttgattttcttagtgcagaaaaatattttgtgctgcatgtttttttaaagaaagtcattttatctgtatatgtgattaaaaccttatttccagtgccatcttcgtgtaattgttaagaacttggattgtggatcacaggaacctggctttgactcttaactgctcactctttaaatggataacccgggtaagttatttcctgtctctgtgcctcagttttcttacaaattggcatgaaaataacagtgcctccttcagagggtaattctgaggattaaatgaaatattgcccatacagtgcttaccacaggctggtagatgattggtattcggtaaacagtagttatttttgttatactaatatgttattaatataattaccattttgtatttttaaatgtaagccataaggaaaggaattattccaatagtttaatttacaaacttgagttttctagaaagacttttaaaaacagtagtgatataaatcaatttatcttaagaaacataagtatctgggccaggcaagtttcagaaatgtttatcattttcaaagtaccaaatattctcgtcaaaacaagctgcttcatcagagttctaattatatatttaaacatacatgcacacacacacgtttgtattacaatattcaaaacttctgaggaagaattatcttttttttttcatgtgccaaagctaaaactttcacttgctacagctgtgtattagtctatttccatactgctataaagagctgcccaagactgggtgatttataaaggaaagaggtttaattgactcacagttcagcatggcagggaaggcctcaggaaacttacaatcatggtggaagtcaaagggggagcaaggacctttcttcacaaggcagcagaaagaagtgccaaatgaacagggaagagctccttatgaaaccatcaggtcttgtgagaactcacttacttttatgagaacagcatggaggaaactgtccccatgatccaatcacctccacctggtctctcccttgacacgtggggattatggggattaaattccagatgagatttgggtggggacaaaaagcctaacgacatcaagctgtaaaaacaatagctaacattcattgactgtttcccagcattaggataaatgtgtgtaacaagaggcattttatttatgtatgacatttgtttatttattatttatttatttggataaatgtctataacaagaaacattttatttaagtataacagcaaatctacaagttaggtactatcatcactcccattttacaggtcgtgaaactgaggctctgaaaagtcaagtcagttttctaatgttgtccagctaatgactggtagatttagtatttgaacccacatttgcctgattccaaagttcaaactcccaacaacatgtggtaaccaaagcaggaacagaagagaaagaagaaatagaagggagggaagatgaacaaagtagacaaagtttagttaatagaattagtggatacccaagaaaaaactatgtacaagagggggaaaaaaaccctgttttctcacatctgggaaacattgatatctatatatttttggttttaaataaaaattaggttatgtcattcatttgcataaaaccatccaaagaagggcctcacaaaattaaaacaaaatccaaactctctactatgggccacaccctccagaacttcagctcgtactatgtttttcctcacacctctcaacataccaacatgtttccacctgcagccctcaccactagttattctttcaatctggaaatattttcgctaagatcttcctatggttaccttcttatcattcaagacttaggttatgtcaggccttccctgactcctccatctgaagtaacccctcctgcttactcctgtttattctctagactccacagaggattcatcactctctgaaatgatcccattaatttcttcttcacttgtttcctctccacgacctgtaagccccaagtggacccggacttggtctgctctgcttacagctggattccagttcccatagtgctagacactaggattaagccaggaaacatgggtgaagcagcaagcacagagcttggggcacagcctagcaaacactccacaaaggaccatgattgtaactgtagtagggcacaccaatgaacaggttgggaaactgagtctctgagaagagactaatgttgtgctggatgaaatttctttttctgacaatacattatccaaatcctccaagctttcagtttaaaggggaaagcaggaactatcattataattttatttacaaagtgtccatgtatgaacattattcaccgccgaatcatctcttcctatgcaagcaacaccgtcctatgcatcaatatcctgatctgtcaggattcaggataaagtggacatatacacactaattgcaaagggaaattgtacatcttgcaaaagatgcaggggtttatagagtcttgtaacattggtgagctgctcagatcacacacatgaccgtggttggacaaggatctggcaaagttaacacagatcaccgaagaaggaaaagtggacaacacaacacagtaagttcttcaaaagagttatattagaatatcaaaagattatgttaggcctttgggaaaactcaaaactttatgaagacctcaaaaaattatgcaaaaatgacccttcaatggtcatgctgcaagagtcaaatgacacttcaaacaactgcggctttctatgttgtgcaaatgcatttgttgttttaaaggtcgtaaagtcagggtacacgtggcagatacttatgacttggaggaagacgttagattagatttgaaactttcactgaatgatcgcatttcatgcttttcatctgtacattaaaaagccagaatgtctttgccaagaaattctagcataaataaaagaaaaggatgggattttggaacatcatggtagaattcttgactatcagctttatacaacatgtctggacatttagtgatggaaatgctggattccaaaggaatgtaggcaaaggtactactacccccatgctcttcagaaaacatcctctaaaagcaacagtgatgatcagatactgtggggcaagactgacagtgacactcaagatttccactcttctctttaatcatatatttcctgtcattcatgtgctacaaaactctggaatatgcaaagctcattcaaatgcaaaaccagcctttgctccaacatgagcatatattttcatttaaagacaaatcagatgtttcatttgattttttttataaatctgataataatgtacatttaacccgtgtttacaaccaaaataattaatctctctgaaccctttgtttttcctgtctctatcctccaccctcattgccagataaataacatctgcaacctgatgtggcatattgaactttgtttatactcacacaaacacgtataagcatcccagatacacatatacagggactgtatctgtccttgttgtttttatagaaattggatcacattagacatattttctgatgacttttgtacattatagttggtcttcacagtcaatagctccaaagctatcttatcttctaaaatagctgcataatattcctcagtatggatataccaaaagatatttaaaccattgcctaatcaatgaatatcctggtagtttccacattgttttttccatttccactatagtggaataaactttcgtgttcaaaaatcctaaactggtgctatatttctatagaatagaggcacagatgtagaagtgttaccctcaaatcaatatgcatttagttttgaaaaacagacactgccatattattttcttaaaaaggctctacagattcacatttccagcagcaatgagtgtctcaagcaccttttaagtggtaagcagcttaccaggggaggtggcctattattctatcagtggcttcagttgttaggacaccacgggtcagctgtggagatacggttgtggggcaggttgagttcaggacacatagaagattgccaaagggtgactattattactttgagactctggaaaaattagccaggaaacagagacaagaggctcagggtgcagcaaagcagccaaatcaggatgatagtgttttctttggagcagatatactaatggccaaggaactcataaaaagatgcctaatgtcatctcattagggaagtgcagtcaaagccacagcatgatacgtcttcacacccacgaggatggccataatcagagagacaataaccagtggtagggaagatgtgaaaaaatcggaatgctcatgcattgctggtaggaatgtgacatggtgcagctgctttggaaagcagtttaacagttcctggaaaagttaaacatggagttaccctaagacccagcaattccattcctaggtaagcaagaaaatgaaaacatatggccacacaaaaacttgtacacaaatgtccatagcagcattttcataatagctgaaaagtggaaacaacccaaatatccatcaattggaaaaaggaaatctagcatttgcatataatagagtattaatcagccataagaagaaacaaagcaccgatccatgttatatcatgctttatacttggaagcatggtactaagtgaaagacgccagacacaaaaagcaaaatattgtatgattccatttatataaagtgtctagaataggcaaatccatagaggcagaaaacagattagtggttgccagtggctgggaatagggaaaaaactcagcgctaaagggtagggagttttgttttggagtaatgacgatgttctggaattagacgtggaacgattgcacacatggtgcaaatatccttaaaatcacggaattgtcactctaaaaggtgaattttatggtaggtgaattgtacctcaatttgtaaaaagaagaattagataaataaacagcaacacagcaccaaggggtgggggtaggaaacagacaacaaataggagtgaagagttcacaggaaaagacatgcagccagcttttaagcagaagaaaagatgtttggcctcataaatagtaaaataaaagcacaataaaattatgacacttggctttcccttgccaaattggttaaaaaggagacaattgatgaccccagtggaaagcgtataaaaaaagagcagctgtggctgggtacggtggcttaacgcctgtaatcctagcactttgggaggccgaggtgggcaaatcatgaggtaaggagttcaagaccagcctggccaacatggtgaaacactgtctctgctaaaaaacaaaacaaaacaaaacaccaaaaaatagctgggcgtagtggcgggcgcctgtaatctcagctacttgggaggcggtggcaggagaatcatttgaacctgggaggcagaggttgcagtgagccgagattgtgccactgcactctaacctgggcaacagagttcagagtgagactctgtctcccccaaaaaaaaaaaaaaaaaaaaaagaacagccatatagatcgtcggtgggagtgtaatttggccacttctttggaaaatagctcagtaatatctattaatacttaaaatttcacaaacactgtaagtctaacttccacttctaaaatgttatcctagaaataaaattgcataggggtacaaaggcttacgtatggaactatttgctggactactgtagttgtggcaaaaaactggaaatgacctaaacgcttattagtagaaacctggttaaataaattatcatatgtccttgaggacacagggacacaaagaggggaatgacaggcactgagcctacttgagggtgggaggaggaagtcgatcagaaaaaataactagtgggtactaggcttagtacccgggtgaaaaaataatctgtacaacaaacccccatgacatgagtttaccttataacaaacctgcacatgtaatctgaacctagataaaagtttaaaaaaataaataatcatatgtccctacaatgaaatattccacaggcattaaaattccccaaggaattttagtaaggaaagaaaaagctgtgcccaacagcacgtacagtatgtttccatttgtttttaaaaaatggtgtcgggaggttgaggagacaacttataaatagacatgcctgggatacctctggatataagaaactgtaaagtatttacttctaaggaaggaaatttgggatggggcttggggagccatcagagttagggtggggattttttctctgccttatcttattatgtatatcgctcagaatgtttgctatgtgtatgcacctaccccatccattaagaaatgaagaaataatgaaaagaaaaaatgaaagtagggaactagaaatgagaggtgggattcaaagtggactgaacacttgacctatttcccaatttgcctagggctggcccagcagcgaggcaggttctaaccaatgagcatcagctttgaatggaggggctgataggccaggtgggccctgcttgctgagagtgtcatggccttagggacatctccatgttgcagagtctgagcctctgcttggcaaattcagaaaatccagcttttctttttatatcacctggagctgatgtaactctcagaaggcatttttaagaggactcatgaattaaccacatagccaacttactggcttaagactacgtgacagaaagctgcaaagggggccagccactggtaacatcccaccactgtccctctctgtggaaaacacagatgggatgcacattgtgacgggcaggatgcctggagagcccacaaatctgcaagcacagctgaaattggttacaggatttcaatgtttcattgcttgaagctatgataacttgatgatgatgatgatgatgatgatgatgatgacgatgattttttttatagccatctttttagagggatttgaggtagggaaaaaaataaacctcacactatcggaggttgccaactatgaggtctgctgatggtttggccaacacagtgtttatatttttttgaattgggaaatttcatttaaaagtcctaaaatcaggctgttattgaaatatcttattattggctcagggtttcccagggcagccatccttgaagctgtgtggagccctataaacaaggacgctttccagttccctgcaaactccatttcattcagagccttgagccagttcttacatggtcctcagacttgagctagtgcaagaatacccgggaggggttgtgggaacagatagctgggccccacccccagggaagggggtgtttctgactcaggaggtctgggctccggctacagaaactgcacatctaaccggtacccaggtgatgtgatgctgctggcccagggacaactctgcgagtcactgctattgggcactgctattgcacccacacaaggaggcaggctctgcttacatttttcagttcttgttcccagaaacatttgctctttggggtatgctttgcatataatggatcctacccactaatacagtatgctgcttttattgataaacttccagaaacttgaagcgcaccttaccatttctttgatctcgctgattatttttatttttgttaaatgaaaattgttggtaagttctttttggtgtggtaaaaggatatgaaaagctgattttaaaaaaatgtccactctaggattagaattgtaggtgtgtttattctatttcaagatctggttaaaatgcaccttgaggaaaagaattgagtgcagctgttgttatttctcaatgctgtttctcttttcatgtttttttcatgttgtctcttggtctgtcctatctctcttggtctatcctccaagacagagatgagtgatcttgaaaccctgcccatgtttttatctttggagcccaactgtgctgccttgttttcttctccatccaaagaggcaaagagaaagttgcatattactcaacagcagttgcatgacagttaaaatcagactgtatgagtcatggaacagtaagttgtgtccagagtatctgtcatggtaagtacaaaaaagtccttaaaaatttaaaacagaaatgccaatgttttatttttgaaaaatgtgaagaagaaattttccggccgggcgcggtggctcatgcctataatcccagcactttgggaggccaaggtgggcagatcacctgaggtcaggagtttgagaccagcctggccaacacagtgcaaccccatctctactaaaaatacaaaaattagccagatgcggtggcacgcgcctgtaatctcagctactagggaggctgaggcatgacaatcgcttgaacccaggaggcggaggttgcagtgagctgagatcataccactgcactccagcttgggcagcggaaggagactctgtctcaaaaaaaaaaagaaaaaaagaaattttctaagtgtattccaaataacttttaatattggataaacattacgagtttaaaaatacttatgccagaggagtgctgtgactcgtgcctctaatcccagcaatgtgggaggccaaggagggacagtcacttgagcccaggagtttgagaccagcctggataacaaagggagacctcatctttacaaaaaaactaaaaaattagccaggtgtggtggtgtgtgcctgtgatcccagctacacaggaggctgaggcaagaggattccttgagccctggaggtcaaggctgcagtgagtgatgatcatgccattgcactccagctgggtgacagagcaagacctcatctcaaaaaaaaaaaaaaaacaaaacaaaacaaaaaacttacgcccaggtaaaaattgtcagagaaaaataagaaaaaaactgaatgcccaaaattagcataatggctgaatgaattatagtatgtctataccttgaagtacattgtagctttaaaaaaaatgaattaaagttataccagttgaatttggagttgagatggggaagattattacaattaaaaaaaaacaaacactattaatggatgtgctgggaaatgtctgtatggggctagttaaagtaaattaaaataaagaccagacctgaagaatccctgagcggacaaagcctgttagaccacataaatgagctaaaccttgcttgatttgcagacataagcaaaacaactcgaactgtttcttgtaaatgcctatgctaaagaaaaacagaacttgagctcaaccaatcagaaacagtcaacaaacttaaaattatataactgggtaccttccaatgagatgatcaaataaggcaactgtgtaattgtaacacatcaaacacattttatattatgcctctgcattttcccttaattctggcatgtaatgctttgtcatcaaaacactaattcccttttggttttcttttctcaaattaatgaattgcctctattcagatacactctttgaaattttattgtgtctcagatttgtcttttacaaagtatagaacaaagagaaaaatatgaaagaagaaatattaggttgttagcttgggtgtccttggagggggtagggaagatgtgagatgaggaagaagccaataagaaaaagaaaaagacaggtttcaccaaaacaacaataacagaaaatatgattgcatttattcatatatgttaattggtatgtatgtaagtatatatgcatgtaaaaataaaatacaaagaattaaaatgcatactaatagttatttcagttatctatggctgtgtaacaagcatccccaaaatgattgacttaaccaccattttattaggtcatgattccatgcattaagaattcagggccgggtgcggtggctcatgcctgtaatcccagcactttgggaggccaaggtgggtggatcacgaggtcaggagtttgagaccagcctgcccaacatagtggaaccccgtctgtactaaaaatacagaagattagctgggtgtggtggcgggcacctgtaatcccagctacttgggaggctgaggcaggagaatcacttgaagctggaaggcagaggttgcagtgagccaagatcatgccactgcactccagcctggtggacagcgcgagactccatctcaaaaaaaaaaaaaaaaaaaagaattcaggcagatgccaggtgcagtggctcatacctgtaattctagcactttgggaggctgagatgggcagatcacctgaagtcaaggagttccagaccagcctggccaacatggtgaaaaccagtctgtactaaaaatacaaaaattagccagacatggtggcacgtgcctgtaatcccagctatacaagaggctgaggcaggagaatcacttgatctgggacgtggaggttgcagcaagccaagatcgtgccactgcactccagcctgggtgacagagtgagactctgtctcaaaaaaaaaaaaaaagaattcaggcagagagaggataggatcagcttatttctgctctatgatgtctggagccacagctggggtgccttgaaaggatgaagatggctgggacggctcacacagggacatatgtctggagctttagttctggctatgggctggttcctatggtccttcctcatacggcatctattagctgaaatgcccatgatgtcttctttaatcacaggtctggttcctggactgggatggctggaatatttgggaactggctgggtacctctctcttgcctcatggcttcttcatgtgactagcttgggctctctcacagcatggcaatctcagggtagaacttctgatattgtgtctagcctttctcagagctagtgttgcaagagacaaggcagaagctccgagtcttcttaaaaggcttcttgaaagtcctgtgtcatcccttctactacatactgttggttatataggaccagcccagaggggactacacaggggtgtgaataccaggaagcatgggttattgcgtggtgggttgtatgtgtgcatctttggagactatcaaccacaataatgcaatagggaagataattttatctaacaggaattctccactagactttttggtgagaaaaagcactgagtttgagaaggatgagatttccccagggctcttgctcactcccaaggaagacagaggcacaaggagctgttgggccatctgggagagccagtgttcagaactctctgttattactttagactcagtggtgatacagtgcaatggagggaaagaagaaaggagagtgcctgtgagtgttaccagtggagagttgtccaggttcttggtgttttgaacaaaaaaattggacaaaatgcacaaagcaatgaaagcacagatttatagaaatgaaagtacactccacagagtgggagcaggtttgagcaagtggctcaagagtgctggttacagaaatttctggggtttaaataccctctagtggtttcccattggttacttggtgtatgccctatgtaaatgaagaggatgaagggaagttacaaagttatttacttggtgtacaccctatgcaaatgaagaggatatttcctgccatagctgaagtgcagttacatccatagttgagcatagaaagttgtgggttttctgcttgatttagttctaggaagtccttagcttccccgcctccagaccctattcccctacctcatgaggatggggtgtctcacagagtttcaaggtggagagttgaggatagggagcctcttgagtgagagacatatagcaatgtgaggagagagaaaagtggtgtttaggatgtgagttagatctccttaatgtcttttgaaaggccagagtgaggatatgaactactttcctttgctcaattctaataattctttggaatcacctctggcagacactgtttgtggcctgcccaatagccaatcgtctccagccccaaccatgtattattattattcacttgcatctcaaagagatgcttgattcccagtatcccatgcagctggtatgggccatgtgatgtagctctggccaataagaggatgcctacatggtggcagaggcttcagggaaggatcctccttcctcgcataatacaaggagaaaaaaaaatggtggcaaagtttggcctttcctctcctgcttttggatcccatgatgtagagatgtgatgtttggttctgtgacagccatcttgtgagcaggagtgacacaattggctcatgtacttggtgttttgatgaggctgtcagactgctgtaccaaatttagaactgccacctccagacttcttgctcaaattaaaagtgctatttacttatccagggttgcattccttgaagctgagtgcagcagagtctgggaacttgcccttcggccttattattttattcctctgctaccactggcttaatatgccactgttcattgatcaaccatttctaagtctttagtgtatctcaggccttgtgctgagctctgggaccctcataacaagaaaggatggcaagcgtcctgctctcagggacttttacttgagtttggaaacagataaaaaataagatcaattggagggaaatagtggacactaggagaacacatgtatttgctcccttccagacaagtgctgttgcctatattttttactacatcagggagctatgctttttggcatcaggtctcccattccactttgactaggcattgatattggcaaatgcttctcttctcactcattatgttattggcaggagcacttttctcaagttagaattttcaatccaataaaatgattccacttacatcttttttttaagaaaagcaaaattagtctattctttttaggaacaatgactaggagcaaaaaaggaaaatactaattttagaaaccttttatccaggtcaaacattccttctgtttctggaaaatgacgtgtcctggcagggaaggcatgtcttagtctctgccatacgttagcagtgaggcctgagaactaatgtcataaatttgctagaaaggaatcaaagaaggccaaaaatcaggcatttttatttctccaaagatctatgaagttttaggcataaataatatgcaggtgggaaaatctggtcaggtgatatgtcagggaaagccaatggtaaagaataagtatgaaaatagcctctactttttttttttttttaaatagagatggggtctctatgttgcccaggctgaactcaaactcctggactcaagcaatcctcccacctcagcctcccagagtgctgggattttaggcgtgagccactgcacccatcccaatagcctctacttttagttttgcccggactcctttatttcagcacttttatcttgtgccagctgctgtttttagagctcccctacaaagttcatactattattccagttttacagatgagactcagaataaacttccttgccaaggttgtacagctagtgagtggcagagccaaaacctatgcttgggtctgttagagtccaatgcttgagaggatatggttccatttccgattgctgtaatgaattatcccaaatgccccagcacaaatatattacagttctgaagcctgtaggtcaaaaatgggtcagcttctagaagctgtaggggagaatctatttccttcttttctctggtatccagaggtcacctacattccttggcttgtggctccattctccagcttccagtccagcagtgtagcatctttaagcctctctctctttgtgacatctgctcccataatcacaccttttcctactccaacccttctgcctccctctcatgaagacccttgtgatcacactgggtccacctggataatccaggataatatcatcatctcacattccttagtcacatctgccaagtccttttgccatgtaaggtcacatactcataggtgctgaagattagatgtgagcatttgatgggaggaagggcaccgtgccttgtgctggactcttagctataatactctgtggtctcatacatgaagaaattgcataagtaagttgcactccctagtgtatgcactctcagtggggatggtattaatcccaagagggcgaaaatggttctatgggagaggatgaacaaaactcattctttttacgtatagagcacagatacagtacatacacagatacacgtcagtgatattacaatttcatgaatgggatgcgcttagctcttaatgcattacctcgtctagtcctggatgtcacctgcgaggccaacgtgtcatctcacttgcccacctgccttctttgccctggccgtccacgctctgcctccccttgcgtccctccccaacacctcagctctgcttgagtgagaagatgactctggggtcccccttgagaacatatgtgccttttaaaactatgtttttgttattgaagaacaaatgttaactaaatcacatcagcattagctgcactctcacagagcttggttttatgctaatactggccatctatctctttaggtgggtcttttgcaaagaaacaaactagaaaacaactatattctcaaggtggtaaaaagcctttttaggtatttccttcccagaatctctaggcttaggctttctcttctctttttagcttttgagtgaaaaaggtaaggagcagccgtcattctcctttcttattggtgggaaagtgattgttgcatattaataggggttgtggcacctccgtggtaatgtttcactaaatggaacagcatattctctttctaggatgattaattttgtgtggcctgacagtggtgtgtgggactaaatgttctgtcctttctaactgcctgatctctgagccatgggagattgagtttctccttcacaatccaccaaagtttgcatgtgaacaaaacaggggatctctgtacgcaacaggagggtgatgtgctcaactgtgaagtgtggtcctacttgaagttgtctgattcaatgagatgcaataaattaacataccacatgtattggggggaggtgaagaggtaccagatgacagtctcctgaggtctccctctcttgggcagtatatgggaggaatgggctgacaaaatagctaagagatgtcatctcttcacaaaacacctccccatcacattactttcttttgtgcagactcctcctgcccccagtgatgaatccagaggaagcaaaagaactggttgagcagaagacacccttctaacatagcaaatgatctttccccccattctttattgaatttattttttttctttagttgatgtgagctgcttttgactatgctggttttttttttgtttgttgttgttgttgttgttgttgttgttgagatgaggtctctgtctgtctcctaggctggagtgccgtggcacgatcttggctcactgcaacctctgcctccctgggttcaagagattctccttcctcaacctccagagtagctgggattacagacgtgtgtcaccacgcccagctaatttttgtatttttagtagagacggggtttcaccacgttggccaggctggtctcaaactcccaacctcaggtgatccacctgtctcggcctccaaaagtgctgggattacacgcgtgagccactgcacccagccaactatgctgatttttaaaaaacttcattgtaccttaacagcatttacaaaaatcagatttatctgattgaagtataattcacatacaataaaatccaccaactttaatagcacaattcagtgcattttgacaaaatatgcagtcatgtagcctccaccatgatgaaggtataaagcttctccatcattgcaaagtttctcgatgcccctctgcagtgagtgtctcaaccagccccagcccctagcaaccactgatctactttctgtcactacatttgtgccctttctagaattttatataagtggaatcatgtagtatgttgccttttgtgtctggcttctttttcgtagtataataatgttgagattcatccatgctgttgcattgatcagtagttccttcttatttattgctaaggagtataccatctgctatagcctgaatgtgtcccccaaaattcatatgttgaaacttagttaccatgtgatcatattaagaggtgaggccttaaggaggtgattgagtttagagggcaaagaccacataaatggaattatagactttataaacggacttgagggaactagttagtccctttcctgcccttctgtcgtgtctgccatctgaggacacagcattcctcccctctggtgggcacagcaaggcgccatcttggaagtagagaacagggccctcaccagacactgaacctgctggtgctttgatcctggacttcccagcctctagaactaagagaaaaaaatttctactttttataaattaccagatctatggcattttgttatagcagtacaaacagattacgagaccattgtacggatataccctaattggattatccgttcttctaatgatagatattttgctctaataattctcaagatatttttgggttcaaataaaacaactatttgaaaaggatggagacaaattgaggatactaatttaaacaattgcattttggcagaacaagcacataagcctctcacccaaagtttgcaagcaaatgtgtttgtcttagtggcattgcaggtaaatcacatggtatgttgttttaacatcattagcaacctactccaaaacgggacactcaaataacatctaaaattggtgagttaagctagaaatataacataagcaaaaactgagacattttgattttttaatatattgttacttaagatgaataataataccaaacttttgagaaagatctccaatccacatggattgtattacttaatgtttgtttgatatcaaattcccatggtggtttgctcttactaagaaaaagcactctacacgatacatttctttctaggaggatacagaatgtaatttcatgttttagtttaaaagaggtattttccctgattgatatctctcacattgtatcgaaagacaaataaaagacttacaaggcataagggatgtaggaaagactagttttaacttttgatcttaaagttccaaaagatatgttaggcagaaataatacagttaacttcaaatagcaatggcagtctttatgtcaattgacattaaatccaagacagaataactttccttatgtgtttaccacatgccagacactgttctgagagttttaggagtatcaacttatttaaaccgtacaataacttagaagctttggtcctatcattattataattcccattttacagatgacagaacaaagaagctcagaaacctgcccaagctcacatattggagccatgattcaatgtagcattccagcctctttggctgtttgcttagccatggtaccattgctgcttctaaataagccttcataggaaatattattggatgccaatggtattagtctgttctcaggctactaataaagacatacctgagactgggtaatttataaaggaaagaggtttaatggacttacagctccacatggctggggagacctcacaatcatggcagatgacgaaggaagagcaaagggatgtcttacatggcagcaggcaagagagcatatgcagtggaactcccttttataaaaccatcaaatctcgtgagacttattcactatcatgagaacagcatgggaaaaacatgcccctatgattcaattacctcctactgggtccctcccatgacacgtggggattatgggagctacagttcaagatgagatttgggtggggacagagccaaaccgtatcaccaatgaattgttttaattgtaatttttgtaagtaggaaaagtatagataaaaagaaaccaaacagtcaactagatttctatttacatatttttccaatgacttttctatacctctatacatatatgtatacaccaatagagatcaatagaaatgtgcatcaaaagacatggtcaaataattctctctgaaggacaagaaagggtcacccagaatttcacttttataccccttaaaactgcactgaaaattataacttagctaataaccttaggaaaactgcatgaggacaacaataagcttaaaaggggtaatcactctaaagcaagtttcacaggttgaagatgtcaatgaataacaggcaaaattgctacctcgggattaactgggactctttacaaactctccagcagtagctgaggatgttgacagcaagactgccaggtgtgagggcgaggtacaaataacccatgactcagaaatgtgtgtttcttttccctcgtcatgtgcaggtgttcacacggcaactgctgtctcagactgttgtcctacgtttcaagagaaacctatttccctccttttgggaacatctttgtaatatacatacatatatatgaaatatgcatatatatatgtatatctcaaatatgtgcatacatgtatgtgagacatacacatatatgagatatacctatgcatatgtgtatctcatatatgttaacacacatgcataatatataaaaaacataaatatattacaggtgagagaggaaagaaaagagaaagtgagatggaggatggagagaaggatagagaagaggctttctcaatcccaacaatttttccctattcattccttgcccttgcactccatattaaacataagaagataattgaaaacaaacaacccgattaaaaattgggacaaaatgagaatgtaaactggcgtagtcattatgggaaatagtatggaagttcctaagaaagttaaaaaataaaactactatattagtctgtttttcacactgctgataaagacatatctgagactaggaagaaaaagaggttgaattggacttacagatccatatggctggggaggcctcagaatcatggcgggaggtgaaaggtacttcttacatggtggtggcaagagaaaatgaggatgatgcaaaagtggaaacctccgataaaaccatcagatctcatgagacttattcactaccatgaaaacagtatgggggaaactgcccccatgattaaaattatctcccactgggtccctcccacaacacatgggaattatgggagtacaattaaaaatgagatttgggtggggacacagagcaaaaccatatcaactaccatatgattcagcaatccacttctgggtatatctaaaaaagtgaaagaagggtctcaaagtggtagctgtagccccaggttcattgcagcattattcacaatagccaagatatgggaatgacctatgtgtccatcagtggatgaatggaaaaaggaaatatatatatggacacacacatatacatatacatgtgtgtaaatacacacacacaacagaatagttattcaatcatacaaaagaaggaaatattggcatttgaaacaacatggatgaacctggaggactttaggataagtgaaataagctagacacagaaagacaaatactatatgatctcacttttatgtggaatctaaaaaagttgaattcatagaagcagagagtaaaatggtgattatcaggggctaaggtccagggaaaattttggtcaaaaggtacatactttcactcataagatgaataagttgcatggtaaatataagttaataatactgttttgcttacttgaaatttgctaagagtagattgtaagggtcctcaccacaccctacaacaaaaacaaaaaagtagctatgtatggtggtggatgtgttgaatatatatatacacatacacacacacacacacaccatggaatactactcaaccataaaaataacaaaataatgtcttttgcagcaacgtggatggaactggaggccattatcctaagtgaagcaacttaaggacagaaaccaaatactgcatgttctcacttgaaagtgggagctaagccatgtgtataccggggcgtagggtagcataatggatattggagactccaaagaagggagggtgggagtggaatgagggtgaaagttacttattgggtacaatgtatactactcaggtgacaggtacattaaaagcccagactttgccactatataatcacatccatgtaaccaaaaaccacttgtaccctaaagctatgatttttttttaaaagaaccttctacagagcccccaatagttcaggttctcagtccccaactttagggtattctgaatagcagctacgggatgagactagggcatggaatttttaatacattccctaggaaattctaaaagctttggaaccaatgctgtaatatacctccttcattactcaggaaaggaaactgaagcccagaatcttacatgtgaaagaaaacaaccataaccataatatgataatgataggagcacttattatcagtcaggcactgtaatatgtgctttcattatatcagatgcttatgctataagtactgtcattattcccactgtacagatgaggagccagaggttcagagaggttatgtaacttgctcaaggtcacacagctagtacgtggcaaagctagcaatctgattgcagaattcttaccctcaactactgggctatactacctcttcttacataatttatatgtatccgtcacatagtagagcctgaccaccctggaagcattgaatatacagtcttatactccaggataaagtcaaataggtaagtatatgcctcagttttaacactgccctcatgtggacacaattctgttgtcttttataatttatcagcttctgaggaattcctaagtgctgataatggcagaggctgtgcacatttggggaaaaggaatatatgaaatatcgctggagactatgttaaatgtttaataaacaacctcctttaatcctgatagcaattctgtgaggtaggtacttttatccccattttacagatgagaaaactgaggctgagaaaagcagatgccttgttccaggtcacacagccagtaatctgcagggcagagattgcaacctaggtctgccaagcttcatgttttcactctattgcttttatcttatctgctgtaactcctcagtctcctccagctgtcacacacactcagaagagatctgttgttatggctgaatcatattgcccccaaagatgctgaagtcctaaccccctgtgaatgtgaccttatttggaaacaggatctttgcagatgatcaagttaagatgaggttattagggtgggccctaatccaacatgactgcttccatatgatgaaggggaaatttagacatgcatagagggaagatgacatgaagatgcagggaggagatggccatatctacaagccaatgagaggggcgtggaacacgttctccctgatgacccgcagaaggaaccaattctgctgacaactttattttgaacttttggccttcagcactgtgagacaatacatttctgttgcttaagccaccagggcatggtagcccaaggaacaaacgcaagtattttcaaactgagcctgcggcttcgaccctttcatttttttttttttttcaccgtaaacagcatctgcagaccccccttccccacgagagggtagatgcccttcccagagtagcactgaccttcctctaagtgctgaactgtgtgggtcgacaccaccactggaaccccgttcagagcagacgcgttgtcctgaaacagagcacgtggcattgtgagacaaatcttcgggggaaaatcagaagaactcaaggaagaacctctaagatacaagggtgtctcacaaaaaattaaacttaacttaaaggctgtgtttctagaaactccccagttttctatcatgccttggagaaccaaaataactcactccaagagtggactccagttattatgagagcacaccatggtgcctcagctcaggggaccccacactcacaggaagctctgacccgtcgcacggaggggaccccaggctcaaatgggcatttgtcaagtcagggctggagcacgaatttaatatgctgattctgacaccttttaggttatcctcgctccactgtcttgcacacacagacacaatcaatcagcagccaggacttcagtcaacacacttgtcaaatacaggaagttcttttttttttttttttttttctgctgatgcccctgtaatggttactacactacctggtaagtctctgcttctggttcattctcttggtcttcaactctttggggaacactcatttggttacccattgctcctataatggagagaaagagaggaagagagaaagaaatcaaaaccaaacgaagctacatgtgctactaaggtgcagaggcctgacaagccgcccatggctgtattatcatcagctgagatcagaacaaattgcttgtattagtccgttctcacactgctatgaagaaatacccgagactgggtaatttataaagaaaagaggttgaattgactcatggttccgcatggctggggagaccgcaggaaacttacaatcgtggcagaagacacctctccacaggacaccagaagaatgagtgcgagctggggaaatgccagatgcttataaaaccatcagatctcgcgagactcactcagtatcacgagaacagcgtggaggaacccgcccccatgatccaattacctccacctggtcccatccttgacgtggggattatgaggattacaattcaaggtaagattttacgtagagacacaaccaaactatatcattgcttatatttattttgggaaatagaaaggagattttggactcatgtattcaacagaattaaagttaaatgcagtcataattttcagttgcatttcattgctaggggaaaatatttatcatcatgaaaagtgtattcagtgtagatagcatttttttctcttttagttaaagtcacagctattaggattttagaatgagggtaattgaaataataatatttttttctgattctcaaactaaattaattcccctattaaaaccttttacactacggccttttttttttcatagcatttagcagggcttgtaattatatacttacttgggtatatattcatgctttcactgatttagcacatatggtcatgtgtcacttaagggcgagaaaatgttctgagaaatgcatcattagatgatttcatggttgtatgaacatcatagatagtatagcctactacactcctaggctgtatggtataacctatcgttcctaggccactaacttgcacagcacgcaaccacattgaacactctgggaaattgtgacacactgggaagtatttgtgtacctaaacatatcgaaacagaaaaagtccagtaaatacatagtattataatgtcatgtgaccactaagtatatgtggtccatcattgactaaggtatcattatgcagtgtatgactgtgtctattgagcacagctctgcacctgttgctgggctgggcactagggttacagctgtaaattaaacaggcaaggccctctgacttcatggagctgaagtatggtgcacagggagagagttaacataggaacaataaatccacaaacgaggttgtttctgatagttcaaggcagcatggcacagtggttatgaccacagactctagagcaagactgcctgggcatgaatcctctctctgccccttgtagctgtgtgtccttgggagagttaattagcctctctgtgcctcataagactgctataaggacccaatgagttaatgcttgtgacgtggttagaacaatgtctagctcatgttaagcaaaacatatctgcttattaaacaaaaatgcatagggttctaagttatgaataaaagtaatttttttttgagacggagtctctctctgttgcccaggatggagtgcagtggtgcaatctcggctcactgcaacctccgccttctgggtttaagcaattctcctgcctcagcctcctgagtagctgggataacaggtgcgtggcacaacaccagactatttttttttttttttgtatttttagtagagatgggttttcaccatgttggccagactggtctcgagtgcctggcctcatgtgatccacccgccttggcctcccaaagtgttgggattacaggcatgagccactgcgcctggtcgaataaaagtaattaataacattacgtgagatgggatcatatgggagatggcaggttgtggcactgctgggtaggatggttctgaaatgactgttaatgtggttattgtcccataggtgaagggcaaagttgaatatttaatttatgtctcccttccacaagaaattgtaagcaccctgacgtcaaaggcagtgtctaccttcacccaattttgtatctcctaatcttagcagtgtgtttgcatttactgggagcttaattattgttagtcaatggagggaataacgattgatagcatctctcacatatgaggcacagacctaggtacatgaccacatcatcaccaaacctctgaagagcttcgttataataatgtatgatatataataataatgatgataatagcaaatcattacttagcatgttctcaattccaagctctaattttggagtgcttcacctgtattgtctcatgtagtcctatagcactcctgtgagatagaggtatcatgatttcattcttcatatgaggtagccgaaactcgagggggttaaatcattttccaaaggtcacccagttaatgagcaagattcaaacacagtctggctgtgctcctaaccaccggaatgttctgcatattactagcttcccttaaaaaggaggaatggaacctccaagacccaccaagggcaaacatccagtgaggaattgactcctagtatatctgatccctacacaaggactcttgcagccactccaaaggcctgctgtcttgccacctaaagttcttttgcacatgtaattccaatgtagcccatctccaaagacctagcttctggcttatctgctctagtggctctcggaataaaaattaggacttttgatttctggctgaaaggagtcaatgagtcaccagggattcttgtggatctctcgccattggtgtgagtttttattccctggtagtagacgcattgagcaattagatattgaggaggccaaaaaaagggtcatggatctcaccatgtgttctcttgcaggaatttaatacataaccaaatctggggattttgtatgtcttctgatcataccacataataaagctgagcactgttaaaacatgtaggacacttgttgttttgtgctattttctatttataaaatccgtgactcacacacttgcatcagatcatcgcttctgtctgttaatgggacattatgaataatataatattgaatcctcaagaccagggttggcaaagaacagcggtggctggattcagctcactgcctgttttagtaggccagtgagctaaaaatgagttttaaatttataaatggttggaaaaaaattagaagaatcatagaatgtgacacatgaaaattatatgaaagtcaaattttggcatccataaataaagttttgctggaagatagtcatgcccttttatttatatattgtctatgatggctttcatgctataatggcagaactgagtagttgcaacagacacctatggcctgcaaagcctaagatatttactatctggctctttacagaaagtttaccaggatttgagcctactgtgtataaaaacaatgacaacaactctaaaaaatcatagaaatgatagagtaataacaataacaacatttggtgagtgcttaccatctgttgagaaacttctaggagctttatttgcagtaaaactaatttgctctttgcagcaattcaacaagacagaggtattattatttcaattttgctggtgtggaaactgaggcacgcaggttaaatgtctcagtcaaggatacgcgcaaacacatacgttcatatatacacatgcaagaatatatacacacaaagtatctctatctaaattcagcttttaacaagttttaaaattattttaacagtaggattacaagctttattttaaagctcttactatttaatgtaaattcaatcctaacaaagctactttgaatcaacacttgaggttatgaaaaaccttggtgctggaagacgcatggtgtacagaagtaggagagaagatttttcttcccacagagttggggttacattattctgatcattgcacaccctaagtagcctctcggccacttcaaggtgaagggccctgaaagaaggaaaatctaatggcgtgtctttttcagtgataacctggattcagatattgtcactctccaccagcagatataatgcatgtgtcgtgaaattgctcctgcctgtccatcaaccttttaaagaacaggattcatctgggtgggacaaaagcaaaaggttactgccatctattggctgatgtcaatattagcagaaatgaattcagcctacaggactaggtccaaacaactgggaaggctgaaagaagcattttgatgttttgcaatgaagccttctgttcacagttggcaagaagatggcaactccttcagtgccccaaaggtcctggaactcgtaataatgataaccatatatgacttgtatggagagcttgccgtatgccagcccagtgctgaagctctatgtagacatcagtgtagcacataggataggaatgtgggctctggagtttggaatccctgagcatcactgagcctcgctgggcctcagtttcctcatctgtaaaaatggggataattatagcctccatctcaaggggctggtatggagtcaaaccagtgaatataagcaaagtgccctgaacagggcctggcacataaagaggactgcacaagagttagcatgagtaggactctcacgggtatgatccttgctctttgaagccagtttctcccacaggtgcccggtagtgagactctaccgaggaatccagcaacatttctgattcctgtgatcctctcaccgaaaagtcaatttggggccctggaatttgtatttttagcaaatgccccagtgattctcatgatcagacacctatagaaaatagtgtgatggtgaccatcttcaagctttttccaggagtgaggatgctctaggacacaggactcttatgttaaaattggaaaaccctgggcaaaccagaatgacttgggtggagacttttttttaaatccccgtttaatagatgggaaaactgaggctcaaggcagttcagacagtaattcttgtctgtaatagttttctcccatttctcaaaaaggagaaaaataaatcagatagagtttttcatgataaacgtacaattgaaagagctaactttcatttttgaaaaagaaaaagtttgaatggggtgttaaaatgccctttctttcatgaactgattatatgagtgttttgtctttatgaccttattttacattaaacatacgaagctatggtgggtggaggggtgttgtttttgaaattagacttgtgtttgagggtttggcactttgccactgggggttgattgtggaggttcagatgagaaagccccttcacttccccgcctcctgcctgtgttatgggggcccatgcccagactgggctgcatgtgagaacctcccacagagttctgagatccccatgcccaggcccctgccaaactgatgacagcagattctctggggtggggctgggcatcggggtactttcaagatctctaggtgatttccatggctgagagcccctgttttggatatttctggggtgagtgagtgagtgtctcctggggtcagaactctcctggctgctgcctaccctgacctagacaaccaaacccacggattctcagacggaggaatagctcaggcttcggagtccacagaccaccatcacccaggcacctgaatacactcacaacccttctaggggcactgctttgctgacgcactgtttcgtgagcttgcaaatcaagagaactgtcctgggcctccagcttcccttcccccagaactggcgggcagggcaggctttccagctggttattcagaagcaagcccagatgccccaccggaggtgggtggaggctgccctccgcagtctcgctctcctgcatctctggggttcccctctctcctcttgagaacaagagatctggagtgagacaggcatccgtaaaatcccacgatcgtgaggctttgggcaaagcacttgacccttctgaaagtatctttcttgtggaaaatgacagtattcataatggtggcaataataaacacatttagagtgttttctctgtgctgagcagttctgatttgcatatatttgcctctcttggtcctcccaacaactctctgagttaggtacttttattttcccagttgtcttatgagaagccggagcacagagaggttgagtggcatgtcctgatacatcgtggtaccgtgcgaaggggtaaatgtgatgggaaagtgcctggcagggcgagcacctagtagctattagtgatatagatgtcccaaactcaactcatgatggttcgactgacaatatttcaactttatgatgagtatctatctatcatctatctatctatctatctatctatctatctatctatctatctatctatcatctactttatctatctatctcacacacactatatatataacatatttacaatgtttagggtattttattttggtaccaattttccaggactatatatctatatttcatattttggatatcttgtcctattcctcgatgacttacattgctttgctaaacgttttctccttggaaatatgctgttctttgtttctccctcacaataagtggagcacagcgtttctggagtcaggagcgattttggccccgaaggggcatttggaaatgcctgcatgcagttttgatagtcacggttcagctttggggggcgtgcactggtatccggtgggtagaggctggggacgctgctacataccctgcaatgccaaggaccgcccccttcccccagcgaagaattgtctgctttgctgagggtcgctagtgctgatattgaggggccctgctctagtgcctggacttggggatgttctcctcgtgtttgtagccaggtgtcacctagggatctgcatttctgaaaagcacgtgagtaaattcgtctgtggtggtgaaatagcgcaagccctctgcctgggctcccctctggctcaccctggccatatgcataagccctggctccgtgtctgagaagtgaggggtggagggaaggaccataatagattccttgcgtggagctcctgtgaagattagaagggtgtggcccatgtgttgtataactgggtggctggtgcacagcagctgaggaatagagataagctgttagtataagcagtaaataaaatggaccatacattagcagtagtaatacctaatatttttgtagcgcctaccttatgccagccattgctctgaatgcttctctgtgttaactcacagcttccttatcagaacccgatgaggcaggtattttttttctttttttttttttgaggcgaagtctggctctgtcgcccaggctggagtgcagtggcgccatttcggctcactgcaagctccgtctcccgggttcacaccattctcctgcctcagtctcccgagtagctgggactacaggcgcctgccaccacgcccggctaattttttgtatttttggtagagacggggtttccccgtgttagccaggatggtctcgatctcctgacctcgtgatccgcccgccttggcctcccaaagtgctgggattacaggcgtgagccaccgggcccggccgaggcaggtatttttattgtccccattttacagatgcagaacctgagcccagggaacttaaactcctcacttaagatcatgctatggattgaaatgtgtccttccaaaattcgtgttggattcgtgttgaagccctaacgtgcaatatgactgcatttggaaatgtggcctctaaggaatcaaggctaaatgaaatcagaagggtggaccttgatctgatagaattagtgtcattataaaaagagacaccaaagagctctctctgtctctctctcaaccgtgtgaggacacagcaagaaggcagctgttggctagccagaaagagtggtctcaccagaaatgcatcggccagaaccttgatattggacttccagcctccagaactatgagaaaacaaaaatgactgttgtttaagccacctagtctgtggtgttttggttaccacagcccaagctgactaatacagatcatcttctagtaagtgggagaatgaggacttaaccctcgcaaactcaagtccagagtttagacttttaacttttctattttcatactttctactgtctcttctgctgtataagtgatgttatagttttatgaaatatttatatgtaatataatagaacatggaatagaaaatatttcctgcatattcattcttgcaatgagaaaattataactaggcaaggaatatatatggtacaatctaaagtgaggattaggccgggcgctgtggctcatgcctgtaatcccagcagtttgggaggctgaggtgggtggatcacttgaggtcaggtgtttgagaccatcctggccaacatggcgcaaccctgtctctactaaaaatacaaaaattagccagatgtggaggcacaatgcctgtaatcccagctacttgggaggctgaggcaggagaatcgcttgaacccaggaagcggaggttgcagtgagccgagatcacaccgctgcactccagcctgagcgacagaatgaaactctctcaataagtaaataaataaatcaaataaagtgaggattgaacaattgaagggtcactgataatcactgtaaggatttagcgccagggcttggcagtactcaggtgagtaaacgttagttattgctaatattattcatttatcttattattgttataattgagttagttctgtgttctgatccatgagtgaattggcctcctggaagctgccctcaaatccctcctcttttacacagtgattgatggtccatgtcgcctccttgtagttacagattaataataggccctcctcctggaaacaggccaaacgccaaaccccatgcaagctggcctggagaaagcacttctgaaacttcatcaccagcaggcagctagacgactgttgaatgggagggggggtggttttgaagggtggaatggtgacagaattagtcaccaagtaaacaagcaacaccttcgatcaatgcaatggaatgtaggtaacccaggggccctcctcactgctcagctgagggtgacgccaacatggccaggctggcacacccagcagaaccagccctctgcccccaacatcagtaaagaccttgcaggaggaaagaacaaccccgctttgcctgccccacagtcctgcagctccatgtgtgtgcccgcacagtgctaggaacacggcagctattatcaggagtgccaggtacagtgctacaggttgcctcctgtacaaggggacacagggaactgaaatccagtcctcactgaactgcccaagccctgattcctggtatgggactttgtgggtccaggggcaggggtgccttgatcaaaatcaccttggatgttttagggctgcttggtgattgatgttttgctttcggagtacttaattatgtttgcacaaacggatggtaatcctaaaaatcttagagctcgctctcatagtcttattattgcaccaaacattgttaagtgcatgataatcgcaggtaattttaattggaggcttactatgtgccaggcagcaccagggtgagcatagcaggacacaaaatataggaaggcaaccatctctggtgcagaatcggcagcagagagtgagcgcctccctgcattttatcccccaggtgctcactggcttcacccttgccctgaccctggtgccaggcacttcacacacattgtctccttttcccttgcagagtcccattattccctgattgcacagataaagaaaccaaggctgagcaatgccatcccctcatctcacgaacgtcacctccatgagggtaggcaccttactagtcctacttgcccaagagtagcagtcagaaagctacggggaggcacacctggggtttgaacctgggtccacgtgactcaggcactcaaatcctgaactgcttcagggcagggcacttggcttgaagagaagctgcagacacagagacaatcaagtcacatctaatactccagcaggacagatgagcctgcaaggtgcaaaggtacccccgcccccaacccaaagcctttttcaattcctctccctccacatctcttgtcatggtaaagcaggcagaatccatgggctttaacgggcccattgcttttcccaaagctcatgcctttttcctaaaaacaaaacccttctgggttccagaactctttggaaaaaaagaatcttctgtgatttgggacattggtttgttcccccaccctcacttaaatgagaaactactttagcatgccccgccccgtctgttgtctttatttaggaggaagcaccctctacataccctgagtatatacacccagggcctgaagctgctgtgatcagctcaggatccccaggaggctgaggcggatcaggccctggactccgggggaacaatgtaagggacaccaaaaagctcagccatggagatgaatagtattttaacatgaaatttgtgaaaatcaaaattaccgctgttcctgatcttatctttctgtaacatgttcatagtttgttcatcacgggtgtcttgccattaattctgacttttaaaaatgttgtgttaacataccgtttatctccatgactgagttttttggcatcccttacatttcgtgcccaaggtgagagtctcactggctgcaccctcatcccaggcccgactggactccagttccacagcatcctttccatgagacctggaaccagatgcagctccctcttcacccagcttcatgttcctagttgtaaaatggagacgatggtaacagcgaaaacaagaaccacagctaagagttactaagtgcacaggtatttacgggcagtagagtcctctcagccctttgatctcagtactgttattaggttcactttacagatgaggaaactgaggcccagagggctgagggaacctgctccagggcacccagccagcccagggtggagctggggctggcatctggcggtgtggctgcagcgcacccgcattctaatcgcaatgactcttccaggcaggaaactggttcagagggagatgtaaacagcaggggtcctgaagccaggatttgaatcagcagctgcctcatagggtggtcttgagcgttaaataagattcacaaaaggcactccacaagtcctttttcttgtcctcccacttctttaggcaatgcctgaggtgaaggctcagattccactcggctatggggcattcttgccctgacggatccccaaatcacacagcctatccctccatccagtgacttctccccatgtcctgtgcttgaaatgaccctcaatagttccaccaaataggagttatttatgtggctatgcgcctaacactgaccacattgtcatttgctccttgtaaaactaaaaactttgagatgagtgctatctttgggtccatttcacagatagtggaactgaggcttacacatatccaaggccacacagtgaacagaaggcagagctgggatcaaacttgaccctgtctgacccctggcctctatatgacaccgtctaccacaaacagcaaaccctccagccatgcctaaaggatctgaaagcagttacctgctgagcccctgtgggagtatcttcagtcccctcgtgtcacccggagctgctcctgcacagggtcctgggtctccagtgcgtgctgcccagtgcctggctgtcggtggagcctggctccctgcactttgcttccttgtgcagagcctgctggctgaatacacagagcagggcaaacacaagcctgggtggagtcctcccttctccccggaccatcctgcagaaacaggttctcttcctgatgtggggctgccctcccaactccaataaaaactgagcacctgactcctctcgcattaatgcctccctggcaccccaagtattctacccagtgcccctcacctactgaggctgccgggttgacctggggaagcagtttccttccccagtaaccgtaggtcatggtcagagcagggaaaacacgttctgtgagattttgtagttctgtctgctgacttcagaacaccacctccaccaccacctaaccacctaattggaaggaaatagcttctcatccactcaactacccctagtcatgtaaaccttattcccaaaggggtttggacaccagaaatcaggtaacctgagggtggtttattgctctggagacataccatgatgttggaaagggcattctttttctttgcaggccagaaattcgacaggctatgcaatttatttaattcaagcaaggatgttgtttaaagtgtcttacaaggacatatacaatagattatgagagcatgaaataacatgtaacaaaagaagattgaagaacaaaatttggaacatcaaatgagaacaggatcaaaaataaatgctcttgttgatttacagacttgctatgaagggtttgcagatatggctttgagcttcctaacagccaatgcaagaaaggaaacttgataagttacactacttagtgctctggagaagacattcaagagaattgcgaccaataattattgtggttttattcaacagtatactcagcttaacccctatcatgaatacttgtcaagcaccaggctatatatataagccagagtttaaagaggtgagtaaaagatgctgggtctctacccttcttgcactcagtgtcattggacatagaatcctgtaaatataaacatagaattacagggtgtgattctcattataaaagaaaagccaaggcagctaagggagagaaatagagagagctggggaaggcctctttcagaaatcaacatttaagaaaaaaaatactatttaaataaatgctgaatacacaaccaggcacaccgtaattagggttgtaaagtcgattccagctcagcactgtacatgtcaatctggaatgtagtaaacccaattattaagcagctgccatgcacacgctctgtgctgacccaagcctggaggctcaggagcttgagctctggccctgggttgagacagacaagggctcggatcttgattcttactgatcggctgtggaattatgagcaagctactgtacttccctaagtctctgtcagccccctcagctgtgtgctcctttgtgtttattttgcatctattcttgtatccccaactcctggcaccctgcaaaacgaggatggggatccctctatgatagagtaggtactctgcaactcctggctgattggacttgttcattctttttttttttttttttaagacggagtcttgctttgtcatccagactggagtgcagtggtgttatctcggctcactgcaacctctgcctcccaggttcaagcaattctgttgcctcagcctcctaagtagctgggactacaggtgtgcaccaccatgcctggctaatttttgtatttttagtagaggtggggtttctccatgttggccaggctggtctggaactcctgacctcaagtgatccacccgcctcagtctcccaaagtgctgggattataggcgtgagctaacactccccattgtcttgctctcttttaaattatacatggcagtaactgccatttggatggcattagtctttgcaaagccttttgtgtttatccgtccatttcatttatgtccacagtgaaattaagatcttttgctcccattttacagaagaaaaacataaggtttagggatatgagtgatttaggagattaagaaaaatcattcaggtgggggcactcagcagtgtgtctggcaaaacgtagaccatcaccaagcatcagctggtgtagtcaagggtgttgatgaaggatctggcaaactgtagaccatcaccaaggatcagctggtgtagtcaggagtggtgatgaagggtctggcaaactgtagaccatcaccaaagatcagctggtgtagtcaggagtggtgatgaaggatctggcaaactgtagatcatcaccaaggatcagctggtgtagtcaggagtggtgatgaagggtctggcaaactgtagaccatcatcaagcatcagctggtgtagtcaggagtggtgatgaaggatctggcaaactgtagatcatcaccaaggatcagctggtgtagtcaggagtggtgatgaagggtctggcaaactgtagaccatcaccaagcatcagctggtgtagtcaggagtggtgatgaaggatctggcaaactgtagatcattaccaaggatcagctggtgtagtcaggagtggtgatgaagggtctggcaaactgtagaccatcaccaagcatcagctggtgtagtcaggagtggtgatgaagggtctggcaaactgtagaccatcaccaagcatcagctggtgtagtcaggagtggtgatgaagggtctggcaaactgtagaccatcaccaagcatcagctggtgtagtcaggagtggtgatgaggcaggaccggctacataatctgctgaacccagtgcaaaacaaaaacgatgagccctttgttctaaaagcagggaaaagtaccgttaaaggtatgaaacataaagctgttttctctccttcctggtctctttctctacctgtcatgtattttacttattatttgaagtcattctaagggaagaaaaaataaaaatgtaagtgatcagcgtgagttttgccatccgtctttagatcaagccatgctggtttgaaatgcaatgaactcgagggcagaatcaccaaaatcatacgacttgtattttgtagttagttacggggcccccgtagtctgttctcactaaaacagtgtaaacgctgcatagaagtcatcattcaactgtttttactctacctctggatactcacccattctactaatgctctctatcttcagtttattgatgaataaggaaaaatcaaaagaaaaagaaactctaagctgccctatatttctgtcttgctatgttatcattttcagcacaagtggttggcccttacagggaggtaacctgggtaagaaaggctaggataggattcttttgttgtttgtgtttcttagaatgtgctgccttttttctgtattgaagataatttctgatttgcgtggaaagcctggactcttggggtgtcagtgcctccacatactcaattgcagctgtaactcacatgtgttttacttgctttgaggcttactgaatagtcatgaactcactggcattctctgctcatgggcatcatggatgttatatgtgaataggtggcaatgaacagtagacttgcatattgcttgtatctcatgactatgcttcattgtctcatcagattttacttactcaacccaagttcaaagataacactacaactgacccttgaaccacaagggtttgaactgcatgagtccacttagacatggattttttcccttcttctgccacccctgagacaacaggaccaacccctcttcttcctcctcttcctcagcctatgcaatgtgaagatgacaaggaagaaaacctttatgatgatccatgtctacttaatgaatagtaaatatattttctcttccttatgatgtttcttagaatgcgttgtctttttaatgttcttaataccattttcttttctctagcttactttattgtaagaatgcaatatacaaatgtaatacatataacatagaaaacgtgttaatacataaaacatagaaaacatgtttatgttattagtaaggattctggtcaacagtagcttatgagtagttaagtttctgcaaagtcagaagttatacttgtattttcaactgcacaggattgatgcccctaatccccgtgatgttcaagggtcagctgtgttaagattttcaatatggcaactgtagagcaataaaccaagctcagggccctgggtggaggtagcaacaagtcttcaaaagtgcaaacttcttggtggaagaatttacttcccggtgtcgacaaagcagggagttcactaagagtaaagtttctccttgctacacagacttcaggtggtgctcaccatcatgctcccaacttggtttgcctcttaatcttctctctttacgatctccacccctcttcaaatattgacaagcacatgtggctgtcatctcctgttatcaaactgctttcctgaaaatctggatagagctggtttttgaatcaaaaagagtcattggaaaactgaaattggaaatctccccaggaccctctttcagacctgcccctgcctctctgcaaatattccgtcctccacccaggcttctcgctcatgctaagccatgttggctgtgtttttgatcactgaaccagcggaaggcatgacccagccattatagtgtggtcatgcacccagggcctgtcagtgacagctggtctcctgccagtcaggatgcccaccctgctccagctgagacaggaaatctgacatgcacctttgtctttctgtatgccacccatcacttggcatttttcagatcactttcttgtgctttatctgatatgctccttactataatcctatgacataagaagtatctatttgcctgaggaggaaacagtttcaatgaagaccaatgtcttatgctaaattaagccatgggctaacactgggggcagatctctcaagactaaactcagggtcagtcttggttaggaacccagggtctggcatcactcagcctgagacagaattttggtttcacagttgattcactgtgtgaccttgaggaggttgtttgccctttctgtgctttcgttttatgacctaaaaatggttctattggcagcacccaagttatagagttggtgtgggaattaaatgagataattcacagaaaatgcttagcacagtgcctggcacccagtatgcttaataaaatgacacagtcactaaggatagggttgggatttaaacacatagcatctgacctcaggacctgcactcttaacaactaaatttacacatgcatatgtaatatatatgcacacacatgcataaacatatcaacataattaaaggaaaataaaaaatagtaacaaaactcacaaataatctagaaaccccatgcaaactgcattgaatgtggattacttgaccatgcatctctgtttcaaatctctgattctttaggtcatattttaaaacttacacaacattttgagaactacgttggatgctttctcatggagaatgcatccagtgtagtgcatggagagagtctaatcctcctaatctagttgaagtgtgagaatatcatgcaataaacagaacacagttttgtattcacctctatccctgtccctggagataggatgggggtttactgctgtcatcggcaaagaccatacctgccatttcccctgattcaaaccatgttctccatcatgatatgctgtttactgacctctgtgagggggccagtgatgagcacagtggttaagagaaggccttggaattacaccccagtttgaactctggctcatacttctgtgctgtgcaaaatcaagcatgtgcaaaatcaagttgtgcaaaatcttcttactctaaaatagaaacaataacatctctcctgaggattgttttgaagataaaatggcatgaggaatgaaaacaccaagcccagatgctgacaaacactaagggctcaaccagaaataccggttattactgtaattggctatcattgagtctacagagatgtgtacaaccatgatgcagccatatattcagagagattaattttcgtcaccactattgggcacccctctttttttttttgagacggagtcttgctctgtcaccaagctggagtgcagcggtgcaatcttggctcactgtaacctttacctcccgggttcaagcgattctcctgcctcagcctcccgagtagctgggactataggtgtgcaccaccacgcccagctaatttttgtatttttagtagagatggggtttcaccatgttggccagaatggtcttgatctcttgacctcggggcacccttcttttattgcgaaaattgtgtcttatttatatttgtaacctaagtgcctacctgaatgccagcccaacgtcaatgttgcctcaatggctcatggcatgttgaatacaatatggtacctgccatatcagtcttaggtttagatctcagctctgcttcagctatgccatgtgaatgtgggcaaattccttaagctccctggaactgttttctcactgccaaatagggatgggacgtttaatgtatgggaaatgtctagcacacagcctggtacataacttgtgatgtacagcagcagaaggtaactgctgtttttcatcattattagtattattggagtataaaaaaagtaatatagaaaggaagaagccaagggtggtggttgaggcagagcaaggtctccccacctctgcactactgccatgtggggctggatcttcggtgctgtaggggctgtcctgtgcatcgtagggtgtttggagcattcctggtctctacccataggtgccaggagcatgtctccagttgccatgagaaaagatgtctctggacattgccaaatgactcctagggggcaaaagctttcccgttgagaaccactggggtagaaggatgggtgaaagtttggtagccactttgcagggggtgcacttcctctggaaagctgaaaattggcaaggataggaggcttggagtatggatgatagaaattccagagagagaaaagaggcagggaaatacatcatacgctctgggatcagcaggtgcccagtagttggaatataggatattattgcaatacttagtattatttttattgagaataaggctatgaatgtggccagggaaagagcttgggtatcatgctaggggtctgggctttatcctgaagggtcaccaaatatactgacactgtgaggaatttggggtagtgttgcttgataaaataatgaaattatgacacagctatagcacggatgaaccctgaagacactatgctaagtgaaatgaatcagacacaaaaagaaaaatattgtataattccacttatatgagaagacttaaattcatagagaaagaaaatagaatgttggttgtcaggggctgacagaaggggaatgggaacttactgtttaacgggtacagagtttagtttgggaagatgaaaaagttctggaaatggataatagtgatagttgcacagtatttagaatgtgcctaataccactaagacgtatatttaaaatggttaaaaagataaattttatgttccttatattctatcacaataaaaaatacaagtccagttaaatttgaattccagattcaacaataaataatttttttactctaagtatgtctcaaatactgcataagcatagcataagtatgtttcatgtacaatattggacatacttatacaaaaacaattattcattattgttgaaattcaaatatacttgaaattcaaatttaactgggtgtgctgtacttgtatttggtaaatttgccatccctaagttgggggcattgctgagggtggactagagggaagggaatggtggcaggcaagccacagaggatgcatttagccacaagtagcaggaaacgtgatggacagcagcttagaccaaaagagcatttccggtttaattaacaggaaatccacaggaaggtgcttccggggctggtgcagccgctcaacagtgtctttgaaactcaggttctttctgattttctcctctgccagactcaggtattcatctcatcaaagcaagaagaccacctcagctctagaaccacagtctccccctaacttcagctgcacggagcagggatagacacaaaagacctttccttcccagatattgttgaaaaaaaaaaaaaaagaaaagaaagaaagaaaagaaaaaatagaaactttttttttccttctgggagaaaaagcttttgagaaggcctcagacagagtaatcgacttctcttcatgcctcacttgtcagaactggatctcaccactcccattcgcaaaccagtccctgcaaagggtagtaggattgctgtaattggcttaggtcaggagtcaacaaactttttctggaaagatccagatagcaaatattttaggctttgtgggccaaatggtctctgtttcacactacaattctgccattgtagtgtgaaagcagtcaaaggcaaagtttaaatggatgtggctgtgtttcaataaaactttatttaaaaaaatacaggtggtgacataacaactaaactctaagagtctggacagaagccagacaaagaaagctgtggaaagaacattgaacttggagtcagccccgctcacctggtctgaactcttggctttgccttgtgtcctcaagtaacctacttctctctgaacctcagattcttcagctgcaaaatggggataataatattcacctactaaggttcttgtgggggaagtaggcaatggaagtgagtgtaaggagggaagagtagaaggagtccaacaataatctgagttttctgagctcaagaatgtcaatacaggcagggcacagtggctgacgcctgtaatcccaaccgaggcgggcagatcacctgaggtcaagagttcaagaccagcctggccaacatgatgaaaccctgtctctactaaaaatacaaaaattagccaggagtggtggcacacgcctgtaatcccagctactcaggaggctgaggcaggagaattgcttgaacccgggaggcggaggtttcagtgagcctagatcgcgccactgcactccagcctgtgcgacagagcgagactccatctaaaaaaaaaccaaaaaacaaaaaaaataaaaataaaaaaaaaagaagttcagtgataggtttcagattccacactgcaaccaactttgagcaactatcacttgccaggttttggtggtggtgtagaaactacctgcaattacccaaaaaggctgttcaaatacttctcccttttccagctacagacctgcaagaggctggagttgctttgtgtgcttcaaccaaaacaacatatggcaacagactgaatgcagaagcagatacaagaatccagctgtcttctattaaggcagacagtaaagagacttgcaaaaatgtaaaactaccattatttttgccctgttgtgttttggaacaaaacaaatagtttcgttgaaaaatttttagaaaaaaatcatttttcataaaaatgttatttatgttaaaatggaagggatttatttctttgagatgaaattatataaatttttaaaattcttagttttaatttttaatgtggtaaataggtatcgctcaatccacataaaaattctttgagatcttacataatttttaacagtgcaaagtgttctgagaaccagactttgaaaactgctttttattttttcattacaaatttattataaaacacacagaggataaaatttaaaataataatctataatcctgtcactaagaaatatcctcttttggtatttctttccttccgtatcaatatcatacctatattactcattgtgaaatactgtttcgaaagccggaattttttttttccatcatagatgtcacaaataaatttaaaataggggttgaggggtttaagtacctgagatgaattaactccctggccatattgggtatttaagtgtttgacaccttctgctattataaacatgacagatttcctagacttctcccttagaagcattttccagatgttaaagtattggatcaaacggtagtcacattttagaggcatttgatacatgtcgccaaattcctgttcaactggatggtcttccgtgaggccaggctgggtctccataactcagaattacatttggcacttccatggatgggtgaatggatggatgaatggatgaacaaacgtgtgaaagggatggtttctttgtacccacgttaaaattgggtgttaacagttaaattattttgtatttgcttaattttaaaaaggtgtctcattaggattgctgttgtaattttcatttccttcatgactgtgacattaaaagtgttgtctcatgttgactgaacatttgtctttatctcttgtcaaatgccaaagccattgattcttgacacccagttcctttcatcttctagcactcagcctccttgcagatcagttttccccattccaccaagtcagagataaaaggaaggggctgggggcaagagctttgtgatgagtcttctgtgatgttgctagagggaagtgtgttttttccaagtgaggattaattgccaacttttctttttttttttttttaagacagggtctcactctgtcacccaggctggagttcagtggcaacatcatggctcactgcagtctggacctcctgagctcaagccatcctcccactccaaccttccaggtagctgggactgcaggtgcacgccactacacctggattttttttttttttttcattttttgtagagatggcatccccctatgttgcccaggctggtctcgaactcctgggctctagtgattctcccacctatgcctcccaaagtgctgggattacaggcatgagccaccatacctggccaattgccaacgtttaataatcaggaaactttatataaaaatttaaagatctagtctctcatttgtcaattaaaaggtttggcaatattgtcacatcacagtcgcctgggtctaggcgttggcagccttttcaaagggacacttgtttcttagtttatgttggtttccgtcactccctccccgctggccccacatccattgcctatttatcctcaccctcgtgctgccatttttcttggagcaaatttataagaaccatgaactatttctaccaaaatatgaaaaaagaacactataagagatcccatgtcttcataagaatgcaaaagcatccttgtaaatgaaaagttacatatatttcacagaagtttgatgtatttaatataacataattataatatttaatataaacgtagttgcatatgcttaaaatacaaagtatgtctgtgttgaaaacaagtataattttttcatccaatacatactatgctcttagctggagagtttatgccctgatatttatcacatagcataggaagacccccatctctacaaatattgaaaaaaaaatttagccaggcatggtgctgcgtgcctatggttccagctactcgggaggctgaggctgggggtttgcatgaacccaggagctcgaggctgcagtgagccatgattgcaccattgcactccagcctaggcaacaaagcaagactctgtttaaaaaatatatatagatgattaattcccactttgaacaaacatacttcctgagtcttcctgacccctgcagacacttgagtttgtgagccctgacctggctgctaagcggtgtccgttggttttcctgttgcgcccggggtagaagtttgaagctgagcttcaagtgtttgtctttcccttgggagaaggagattttctagctcacctcacatagtgtgtagacatctgggttatcctcgcttctctagagaactatagctgagaaaatgagaagccatctctgaggagtaataacacacagtgctctgagaggttgaaacagaaactgaggaaaaaaaaccaagtttttcaaaggtggatttaaacatgatcagttttgccatatctgtgttttctctctcctactgcagggcttcccaaactttagttatacactgaagctttttttctcattcctcatgccatataaacgaaaacatattttctttaaattgactcacgatttcatttgaagtatctaaaatagacactgactatgactaccataagtggaaaattagtattatgtcccccaaataaaatgtaacattaaaaaataaacctgtaacaactgtaaagaaaggtcttacgttctagctagattctgttgcctgcctaagatccacacccaaggccagctcactctgttaaaaatatgttaaaggaattctagcatcgccgggcgcggtggctcatgcctgtaatcccagcgctttgggaggccgaggcaggcagatcatgaggtcaggagttcgagaccagcctggccaacatggtgaaaccccatgtctactaaagatacaaaaaattagccgggcgtggtagcacacgcctgtaattccagctacttgggagactgaggcaggagaatcagttgaatccgggaggtggaggttgcggtgagctgagatcgcaccattgcgctccagcttgggggataggggcaagactccatctcaaaaaaaaaaaaaaaaaaaaaaaaaaaacaacaccagaaagaaattctggcatcaaactaaggctttctctttgatacatccagaagcattagttgataattgaaagaaaatggcaaagggaataactacctcaccttctcagttggtgactgaatagtattttaagttcactttatgcccagtgcaaacttttgtatcaccactggtaagcatttcataacttgtgaaacactatctgactgttattcatttattaattgaaaagaaaatatttttattactacttgtgttactccaccaaccagctactataccagcctctcactgattgaacaattaccacaccatgctatttttcttgttccctgacacaagtttttgaaccattcttgtatactatttttcaataattcctagttccccttttacagatgatgaaaataagacttagtgaagttaagaaacttagccaagcttcacacccagtaaatatagagttgaaattcaaatgaagtttggacattacttctaagagcttgaggttatctatccttcagatcaaccaccaaagttgatttgatttcacccctcaagccccaaggctcccacaacttaagaaacaaatgattctcctgtcagagaacaaggataaaaaactccagagaagtgctattttttccttagcaacaaggggagatatggttccagattcagaatcaatcacaaatgtgatttacatggaactgaatttttatccagaggaaacatatttacttagtaaatagaccatcttgaaggagggcaagagtccagaaataaaacaactttcattctgagtaagggaaaatgtggtgtgggccttcttctccagtgatagatgtacagaattttatggaccaattatagctgaagaagattaggtttctttgaattccacaagatgaaaggtcctgtcactcctttatcagctgccttctagaagtttccagccatttacctatctatcccttaaaccatccactcagccattcattcacttacctaccaacccattcattcaggtatgcaactaaccattcacccaacaactcactaatccatccttccactctccttccatccctttctccatgtatccactcctctctccatccatctgatcatcatccatccatccatccatccattcaatgatctacccatccatctatccattcatccatccatccattcatccaatcatccatccatccaccctacatccattcatccatccattcatgcatccaattatccattcaatcatccatccatctatcctaccatccatccaattatccatccatccatccatccatccattctttttgttctccaaacatttattaagcacacaccatgtgccaggccctgcattaagtactaagattataaaaggatacaaagataaaaagagtacaatttctatctgggctacagactaacagggagagaggtatgtataaagtgaaaagaatgtgcaaatagcaggaaataaagggggcatatgaggccaagaatgagacgtgctctctcagcctgaggtggggagtaaggctttctgaaagaagcatcttataaattgagagttgaataaaaaggtggcattggtcagatgaaagccagaggtctggcagggagaggaaagttgatttcaacacagccagccacatgtgcaaaggccgagcatccatagcgtttctaatggtacagtgctggaatatataagctctacattttgggttcttaagggattgtctcattcctgattgagcttcctgaattcagatccttgcttgggctctccctacctaaagacttggattttcatttgtgtttgcattcagatgttgactgaatcttggtcaatattgtcccagattgtttggtaccaggcctaaatgccacagtattactcagagcaattaacctttagtcgtcaacccaacatattcaccatacccctgttgaacaagagactgggcttttctccagctcatttctcctggcccaggctgcctactggcagacttgtaatgcagaattattttgcctgcagcaaatattatggaagctttcttggaggtctgaggttaaaccagtgcagagtttgctttttgcgtcttcttggcatcctcaatggggacatcatatgccccagcctttttctggtgaggctaaacattggaaaccaatatctgtttccttcacatttttacataggatacaacttcatagcatgttggcactcatcatttggaatagtaattcggtgggcaattcaaacctgtcactctcaaaatgttgtagtgcctgacactggatttgtttgtaaacttaagaaaaagtgtgttggaattggaagggctgtgtgactttgggcaagttacttagagtctctgggcctcagttttctccacctgtaatagtaggcacaataatatacctacctcatggaatttttacacaagttaatatttgaagtgttcagaacagttcctagaatacagcaagcatagaagtgtttgttaaatagaattaaaaaataggaaagaggtgtagagtagtgaaatccatttatgcctagtgttccatgattggaacactaagcatgtgggagttatctatatcctactgctcaaggtcattgccaaggtctgatttttcaattcaaaaaattgcaacttcaggcataaatgggttaaaagcaaaggtgcaggagccaggtagatttaggttctgatgtgaactctgccatcttctcactgtgtagccttgggaaagctaattaacctctctgacagtccagttgctgtgaaaatgaggctatgacagttcctccctcttaggatggtgtggggtttaaatgagataatgcacagcacgcgcttggcaaggtgctgtcataaaatatatggtggttgtttgcttctatgtcattattattcaacttaaggtctgagttggccagaatgaggaattatgaaatcacatttgcaagaggaaagtgaagccctgtccctgggaatcccagccgtctgcccttctcctgcatgtcctccagcatccactcagggataggaatctctgcaggtgggagaaggggcctcggttacttctgacaacggtcctgggccacaggtcctattgtccttactttataaacgtgggccctgaatgtttggtgacctgcctaaggtgacccaagcactacgtgacaaagacagcatttgagcccctgtcccctgccccactcttggcatgcacacgcagccctggaatcagacaggcctgggtttgaatcctggctttgatacttcctgcctgtgagactgacagtgagtcacttcattcccttcagctccaaattcttcgtctgtcgagatgactagcaatggctgctctcagggctttggagaagatcgtgtaaggcagaacataagaagcgttcagcgtcatgcctggcccacagtgagtgcttcatcgatgcctggcacataaacttactgtaatgtatactgctcttattactcagcacattctcaacgctactctagatttccaaaagaggagagatttttgaaagccgggacctccagcttcctcaccctagaatgatacatttatgactgccaatttcctgggaatcgtattttttttttcttgtctgggttacagtgtgtaaacgttcataaaaggacactgccctgtttgaaagccaagaacagctgttcggagagcatgtgttgtagggaacttctcaaacaatcgcacaccctggccaccaagtttgttttctgaagggtggctttggatccttgacaatatctattactaaaaagaaagtgtttcaggcactgggtccttccccatcagtttctacttctatgactgtggaattataagtcagtggatgaaatccatgagagccatccagtggtgtatcagcaagggtcaaaatgacacagatgacacactcgaatatgaggataattcaagggacattcactgcctgacagattaattaccaaccttcgagtggggcgtagcaggacaggataacctggaaacccaggggtagcaacagtggaccccaaagacagagcatgggataaagctatatccacttttttttttttttttttgagacgaagtctttgtctgtcgccaggctagagtgcagtggcgcgatctcagctcattgaacctcttcccaggttcaagccattcttctgcctcagcctcctgagtaacacaggtgtgcgccaccacacccggctaatgtatttttagtagagatggggtttcaccatgttggccaggatggtctcgatctcttgacctcatgatccaccctcctcggcatcccaaagtgttgggattacaggcgtgagccactgcacctggcccagtatctgctttaagaacagaacagggattttctgtctaaggatgctgccaatctgaggttacctcactctcctcccttcctataatttcctacctgggatcctcagcagccaagcccaaccagaagcccaaggatagaacactacatcaattgtgtgttgccatcatccatacatgttggccttgggaaacagagagcagagatgggtgggaagtgaaccaggaggggcacacagaagcaatgcggcaggggaggtgagggcaatgagctgcgtggattcagaggcactggagaagctagtcccattaagatcaatcagactgatcaactgttgagctagcaattcaaagtaccaactaaagttgggcaaattttctacaatagcaagcgtgtcatgctgcattgcgatctaaaaaacactatatcttttgtgaggcaatatatcgtaaagcccagatagcagaatgattggccgaagtaaaatagatcatattattcacctctactttacagttttactggatcgacttttcctccactccatcccgaggatgctcacagccctgacagtcaatgggaattggctattccctggtctgggtactctttttatcgacgtgttgatttttaggcctagtaactcagttgtgtttgctcccatgcctgcttatgcctgcagtacctgttaatggcaattgaaataattaatacctaattcagtaaactgtaaggataaaaataaagagagttgttacttctgtgaaaattcagttacattctgtggggaaataaaatcagcaaaggccaaccattataaaagaattgcagtcaaagtatgtgtgagccaggcaattgttaaatgatgggggaatcataagaatctagaaggattctatttataatttatggttggtagtcccaggtcattcccttgctcccaattcaagcccgtagccaggcttttaacattcttcccttgggggatttttcaagggtgacagatgcttctgctctgtggtcaattgctaaaatggagaagaggaatccaagccttgctcatcttctggaattttccacatctctttcctttcatccaaagactttgcttgtgcttctttccctcttgtgctccagggacaccttggaaacttccttcattgatcttttaatattaccaagaatgggacatgcccttttcatctgaccatttctgctttatacctgaggtatactgaagattccctgaggtaactgagaaggctttgagtatgaatgtccctcctctctgctcatgtggaatttttctcacttgccatgttacctttggacaatttcgttctatgcctgcctcttctctagacagtaagcccctgaggatggggaacatctctcatgcatcttggtcccttcaatgtcctggaattgctctggaatattctaagcagtcagtgaatgcttgtaaaatcatctgaaaagtttttgaaaattattgctggagacaccaaaggacccaaagattttgcatttataagtaataacacgttatccaagctctttagacccgaaggatgtctggatggggctatggcgaacacacctgatagcaataacttaagcatacctttagaatgaccctgtatggcagatgaacctcgatgtgtgttccgagataggggatatggaagtggccagcctagagagtcattccctgtctatgaagaacacctgagccccggggccatccactggaacatggaccacaaaggggattgaggccctgagtgttgggttgaatgactgccaggtggaggttgttagggggagggtgctacatgaaagtgctatataaactccttgtcttttgcaagctattgcggttcttctgctcagctcaccgccactgggccacgtggttctcatgtccagtccgctgccactgaactctctccccagtacgtaagtccccagtaaaaccccatgtcttgattgctggctctgggtctcttcttcagcctcttgaacctggagccaacctattggagtcaataggggtttggtgtaacagaggactaagcttgttgaagatcagatttgaaaaagcaaataatcaaaagtagaaaagagcaggacactgctaggtcatgcatgatggcctcaataagtttgttccattttttccttctaatgacttatttcttttctttgcctgaaagatttatgtatctgtagggaatacttttgggtgcaagtagcagaatgcccaacaaacagtagtttaaactgtaagttcacttatttatttcttaagaagtccacagctcagcagcccaaaggtgatacagtggcttaataatgtcatcaaggaaagaacatcttcctgtctttccactgaattatcttcagagcactggctttttgtcctgggctcataatcttgcagttgtcactaatttaaatgtcacatcccaacatggcagcatccagaacaggaagggaaagggtcctcttccttgtatggctctctctgatgtagggaggaaaacgtctctaagaaactctaagagttgtcctttcctcattggccacacctgagccaattgggtgacttgcccacgtgcagacaaatcactggcacattttaacctgttgccacaaactacaaattggcttgaagcaagtgtggcttatccccttagggatggatccatcattgtctggaagaataaacagggtctatttgtaaagaaatggggaaccaacagtgtcttctgcaatgtatttgttaccatggcaaacacatgtattgagatacatgcctttaatgtgggagtttttaagccatgagagatatctcaggaagttcatcaagctatctgtgttcaccatttgtccttccctgaggagtagctttttttgtctcaagatcaaagatagaggtttccaaacatttaaaagacaacgttcaggtttttcttgggagatagaggtgcacagaatgtcagggagggaaacgggctggtgactgagaaaggggaagtgattccaacctggtagacaaatggcaatgcctagtaccaagaaaaggacaacacttcttttgggggattgctgttttctgtgggtaccagataccagcaccacctttgccttcagtcttcctggtggggggcagctgtgggatggtagtggcatcaggcttctgagtgcagaggttctgggagcagcaatgtgagtctctgactctcagcctacggtcaggggaaaggtcatctgtgaagagcatctctgagctgacttgaagcatcagagttcagcagatggtgcaagcgccagtcaggagcaggcaaaaggggcagaaacagccactgtaaccttatagtgactccccggggactctgaaacttcagttttcttatttgtaaaaatagggactgtggttgggcatggtggctcacacctgtaatcctagcactttgggaggctaaggggggtggatcccttgagtccagaagctcaagaccaacgtgggcaacatggcgaaactgtctctaccaaaaaatacaaaaattagctgggcgtggtggtatgcacctgttgtctcagctactcaggaggctgacgtgggaggatcctttgagcccaggaggcaggggttgtggtgagctgctgtactgcaggctgggcacagagtgagaccctgtctcaagaaaacaaaaacagaaaccaaccaacaaaaatcggggtcaaaactgtatctatctcagagatacgattaacaatataatatggtgaaagtgcttagcacagtgcctagcaataataaacctactaaataatagctgttataatattattattttctgatattgtatgattatagaaaaagcagagactccacaaccaagatgaaaatggaaattctcagaaattgagttggttaagtcttggagctaaattcatttgataaagaaaaaagaagagatgtgatgccatttgaatctcaatattggggagcaaattcctatctactatattaaggaactaattgaaggtccaagtccctttgagaatcatgttctctttggagtgcagccttttcaattctactgctaatggtaacatagctgaggcagtcacactgttatccagatgtttctgtcacctgtatgctgaattagacatattatggtacagactgtctgtctaccatctaattctgtcatctttgtctgtatgtatctaactattgctatctatctgtgtctatctatctacctatctctgtctatctctctgtctgtctgactgtctatttatctgacctatttagttcttcatctgtgacatgcaccataacattgtctcatttaatcctcacaacaactcttcaggctagaacagaggctttcaaacttcttggaaaagttacaactaagacaatcacttttcctgagaactctgtttatagaaacacacacacatctgaaaaagttgcctatacttactccatgtgacacattctattcaattctatgctactgtattctattctggtccatttaaaacataatttattgtgggtcacaatgtggcttttatgaatcattattcaactgagttcttgttattctccatttatagaagagaaagagttgggggaggttacagacagatgggaagaagcccagctcatcagagtaagagttggaattgaaccaatggcttctctgatgtccgagcactgaccatgatgccctgctgcctctcacggtgctcctctgaggatgggtgcttcacacccagctagttccctgattattttacgacggccattcaagcccacccacctgcctctagctcagtggttctgaattctggctgcatgttggagtccttggagccactgtcctgaggatgaaaattgcatagacctggactggggcctgcgcaggagtactttgtattattttattccaacctatttctatctttagatctaaagtgagtctcggccaggcgcagtggctcacgcctgtaatcccagcactttgggaggctgaggtggacagatcacttgaggtcaggagttcaagaccagtctaaccaacatggtgaaacccaatatctactgaaaaaaaaaatacaaaagttagccaggcgtagtgacaggcacctgtaatcctagctactcgggaggctgaggcaggagaattgcttaaacccgggaggtggaggatgcagtgagccgagatcatgccattgcactccagtctgggcgacagagcgagactccatctcaataaataaataaataaataaaaataaagtgagtctcaacctgttgaactattctaaaaaatccattctgccaatctgtgcctttaatttatttacacttaaagtaattactgataaggaagaacttacttcaaccatttagctgtttgttttctgtatatcttgtatgctttttgttcctcaattcctacaatactgccatttttgtatttagttgattttttttgtagtgtatcattttgattttttttttttttttggtatatgtttcgttattttcttagtggttatcttggggattgcaattaacttcttgtacttatcaaaccctggtgaacaataccaacttaatttcaatagtataaaaacagtctgcccctagacatctctattcactccccctccatattgttatcgtcacagattatatctttgtacatgtgtgcccattaacaatgacgtataattattgtttcatgaacctaacttttaaatcatatagaaacaaaaaaggagttacaaaagaacagtaggtactttgcattttttaaagtctacccatctcatttcagtgtgcacccagggttaagaatccccgcagggaagagcctaatcaggcgcttacttcttcctgttttagtgggggctgagattgcaaagcaaactagctaatttgctgggacatttataaccagggaagattaaataatatgtacaagcagaaacacaaggcatattattaaagcaagcatgtgtgcaaaacacagtgtcctttcaattgcagcattgtttgcctcttccgcagctggctcccaagtatgtaataccgctgcagaactggctgtggggaggaaaaaatgaagtgcacttctctgattttgtctggtgccatccactttcactcaaccttccctcaaggagagaagaacaatactcccattgagtcgcctttgtagcttgaatctgaatctgctttaataattcctgtttttctgtttgtgtataattatttcaactccctgggtcactaagtcctccctgaaatcggagggctgccttattttcatatctatggtatagaaagcccaaagaatacagtcaaattgaatttcctccccctgcataaatggaagagttcatgaattctgttttctccacatgaacaatctattcttgggaaaagagaattgccctttacgaatgatgaaggaggccatcgtcaattgggtggagtccattttcttcttaggaagcagcatgaagaattcatggcttgtttgtttcctgatatgggaaaaattcacgtgcataacagcataaatcccacccacatatttaggtaataaattaggatgaaaatctcctacgataattagatttgaaaatgccacgttcctgtagagctatgcaaataccttagggagtggactatgatgatgttccaataagcctcagtgtgtctagctgtgaaatgggcaacaaagtcccatcttctgaagaaaggctgacattgtcaaagaaaatcatgaagtgccacatttatgactagctttgagattcatggtctttcatttgaaaaagatacaacgtaatgcttcataggagttatcctaatagctcgctgcaatagcaggcgctgatgggattcttgcctgctgtaccgcgtcttggcaaatactgatgtgggattattttgttcgatcccaataataagcgtatcagataggaagtgatattaaccccacttttcagacagcaaagcaggggttcaatgaggttaacccatttatgcctgaggttgcaattttttaactttgaaaaatcagactttgagaagcaggatataactaactcccacatgcttagcgttccaataatggaacactaggcataaatttaataagctcagttataccatctgaaaagtggggttaatataacttcctcacttcatataacctgcagacatcattgccaggataggaagacaggtcgcagggcaactgaagacctggtcacttttccccagagttagggagatgtaacttgtggagagctggatgcttttaggcattacacaaatgaattccatgtatttatttatttatttatttttgattaaaaatttttttttaaaattctactttaagttctagggtacatgtgcacaacgtgcaggtttgttacatatgtatacacgtgccatgttgttgtgctgcacccattaactcatcatttacattgggtatatctcctaattctttccctcccctctccccccaccccacgacaggccccggtgtgtgatgaattccatgtatttaaatgaataaatcaagcaacaaatgtatcaagtaatgtcacacacttcattggacaaatattattactttagggcaagaactaataaaaacaaaatgaataggttacagaaaaaatattgagtaaataataatccaggtagtacatgtcagaaatcttaatagcttattcaaatgactagaacatattttttaaatggtggaatagaaaatgtgaaggccgggcatggtggctcacccctgtaatcccagcactttgggaggccgaggcaggtggatcacctgatgtcagaagttcaagaccagcctggccaacatggtgaaaccccgtctctactaaaaatacagaaaattagccactcatggtgatgggcagctgtaatcccagctactcaggaggctgaggcaggagaattgcttgaacccaggaagtggaggttgcagtgagccgagattgtgccactgcactccaacccgggcaacaagagtgaaaccctgtcttaaaaacaaaaaaaagaaagaaagaaaatgtgaaggaccctttatatttttttaatgagtggactcattatttccagagtcatagcccccaaatattatcagaacctctaattgtccaggggcaggggcacattcccagttctccttttgccacagggcacagcccaatgctggagccctgcaaacccttaggaaactttgctgaaagtgtgctgtgtccaaaggagcctaggcgactttgctgatctgtcaccaacttgctgtgtggctttgggcaagtcacttcacctctctgtgccccagattttttctgtataaaataaatgtgtgaacaagtttgtatctaaagtatattccaatgctatgtttctggttggaatgagctaattaattaaaaaattactaagtggatattacctctagctattttggggggaagtaccctagcctggggatttagagtgggactctgggtgcagaataactggtttgaatcttgtctccaccacttttttctttctttttcttttctttctttcttttttttttttttggagatggagtcccgctgtgtcgcctagactggagtgcagtggcgcgatcttggctcactgcaacctccgactcctgggatcaagcaattctcttgcctcagcctcccgagtagctaggattacagcacccaccaccatgcccaggtaattttttttgtatttttagtagacatggggtttcaccatgttggccaggctggcctcgaactcctgacctcgtgatctgcccgcttcgtcctcccaaagtgctgggattacaggcatgagccaccacgcctggtcaccaccacttctctctgtgtggctttaagcaagttacttaaattccctgcacttcagttttccgtagagttcatgtacatcagttgtcaaagggcagatgtctggcacattggaaatattaccgaatgttagttatccgtgaatcgggggactgattttataaccacccaaatcatatttatttcctagaggaatgaagatgaaaatagtggtggttagtgtctagcatcgcactatgtttgccaagattaatttgcaatgagccgttttcaaacaggatgttcagccactatatgtacttcttgaagtaaccagcaggtggtgaagttggattatattttagatggtcagggcctggtgtacctcttgcctggggttttgtgagagaaaaaaaatagctttcttttttatcagcaccccaaaccattaacatctggaatcaatagaggctgtatctgtcacttaatgctatagaaattgcaagaaaaaagtcctgctggttagtataccagttctcaaaatgtcagcatcatttgtgtcacctgggggtacttgtcaggaatgcagtctctctggtcccaccccacaggatggaactggaaactaaggatgagcccagtcatctgtgtcttcaagaactctccagtgattctggtgcacttgtgttatagaaccgctgtgctagaggtcttagtatttgctgtgaatgtgagtaggtaaagagagggtatttggtgagtgtcactacctcagtgcaggccagggaccagtggttccacatcaatgtgggggagtgttagaatgcatggtctctggccacaccccaaacaagctggattgaaagtcgcattttcatcagctcctggagattctcctggagattctcctgtatgatctctttctctttttctttccttctcttcctttctcattctcctctctcttcccctttgccatctccactgctccctttctcagtgacaattgggcatacccctcgcagtgccggctgctcaggtgggaaagtggagaagactcttctatttcccagcctgagaaaatttgcttacctgtaatcccagcactttgggaggctgaggcgggcagataatttcagcccaggagtttgagatcaggctgggcaacatggcgtaacttcgtctctacaaaaagtacagaaattgacccagcatagagtcgtgcacctgtagtcccagctattgaggaggatgagctgggaggatcatttgagcctggaaggcagaggttgcagtgagtggagatcgtgccactgcactccagcctgggacagagtgagaccctgtctcaaaaaaaaaaaaaaaaaaaaaagaaagaaagaaaacttacttgaagcctactggagacagacagctaaacatacagtgtgggacacctgtgctgccacctgagtgccaagagcagggaaggaccctttgggttgggagcttcgcacagagggtggccttgagcagcacctagaaatccagttgagatcttcactttctccacatcctcctctccccctgtcgtctgttgttctttttctacttacctgccttctggctcttttcacctgtggataatttattcccacaactcagtctcaccaggatgacttaaagtctaaagtacacgtcagtggttctcaaagtgcagtccctttccagcaacatcatcactttggaacttgttagaaagacagattctcaggctcactccagaccttgttaaaggaaactttaacaaggcttccagaagattctaacacacatgacagctagagaactgtggctttagatggtggcagaaattgttcattgcctactcaagccacgggttcaaattcttcttggtaacagacccagataggggtccaagtttcaggtgagtaacaaacactgttctcagaaacagtaagctctttcccttgccccaggggaatgaaatacgattcgtctacactgcgattctacttcgcaatgacatgtagtggcaaattggggacccaagaagcaactgatggcacagtcttaataaggtaatttaacgggcatttcctgaaaataggctatttataggaatgtgaatgtgtagtaacgcaaggaagagtgaagtaaccacagaaaacagcctgagttgccttccctgtgagaaggatcccttcaactctagacctaagggagcaagaaaggagaatttaggagagagtcaagttggggagtccttgacaggagcaatgaccttatctcaaagtcctcatccagcctgaggtcaagccaggggggatgtcaggggactccttcccctctccccatcattgtcttctctccctgagaccttgaactggcaccccccattggctgagaccatccgggtatacaggaaccctaaaatctttacaggtaggctttaccagtctacatagggtattaaagagcagaatatgagtttggggagcaaaaggaagacatcctgttcattggtctaggggtgagcaggtggcccaatctggccaatgagacatatgggaaagtctgctggacgcttctggaaacattttctttcctgactgtcgtagaaagaaggctctcctttctacttgcttgggatgcttttgagaggttgcacttcttggactttgaagccacctttggccacaaggggaatgcaaagagaactactgtcaagaacctggatacccacagagctattaaaaggccttggaacccccagctccagccttcttgttaagcaaacaatggatgtctctatagtttaagcttctgagggttgtgtgttctgtaatgggaaaatctgtggagttattgctaggaatggtaatggtgaaatcattaaaacacagaccccaattcagagtcaaattcagctgtgttgatgcccttggatctgattaaaagagcttccttcttatttgagtaggggaagtggattctggaagacaatagaatatggacatggaaaggcatccctgagtgcctgaggagggggcttctgggggaagagcctggcagtgatgcctggagagtcagggtcacacccctggcccaggcagagggcactgctcaaaacaccttgtacctccccaggcaaggtccttgtaacccatgacctcagagcattgagtactttagctcagcttcatctgtgatagagaggagacagctcagcctgtctcctgtgaggggaagatttctgtgtgtctgaaggaaaagttctctgcactcgcccaatgcacagcacttcacagctgccctcaccccagcatcgcaatcctctcaactcctgccctgtatcagcctctcccctccccaaacagacaggcagccaggagtaaggccatggtggttgactcaagcatctctcttcccaggctgaagttccacaggtcttgctctaccagctacagtcctgtgacacttagcaatggggtatgttctgagaaatgtgttgttaggtgatgtcatcattgtgggagcatcatagagtgtacacacacaccttcatggcatagcctactacacatctaggctagatggcttggtctgttgcttctaagatacaaaatctgtacagcatgttactgtaccgaacacctcaggcaaccgtaacacaatggtaagtgtttgtgtatctaaacatagaaaaggtacaatacaaatatggtgtaaaagattaaaaaaaaaagatacacctgtgtagggcactgtattagtccgttttcacactgctgataaagccatacccaagactgggtaatttacagaagaaagaggcttaatggacttacagttccacatggctggggaggcctcacaatcatggcaaaaggcaaggaggagcaagtcacatcttacatggatggtggcaggcaaagagagagagcttatgcagggaaactcctgtttttaaaaaccatcagatctcgtgggtcttatcactatcacgagaacagcatgggaaagacccgctcccatgattgaattacctcccaccagtttcttcccaccacatgtgggaattgtgggagttacaattcaagatgagatttggatggggacacagccaaaccatatcaagcccttatcacaaatagagactgcaggactggaagttgctgtgggtgagtcagtgaatgaagagtgagtgaatgtgaaggcctaggacaggactgtgcacaggactgtggaatttacaaacactgtgcacttaggctacactaaatttataacaacatattttcttccttcaataataaattaactgcttactgtaacatttttactttataatttttttagttttttaaactttttgactttttgtgataacacttaaaacacaaacacattgtatagctgtatgaaatatattttctttacatatttattctacaagcttttttctattaaatttttctttttatactttttaagacattttgttaaaaaacgaagacacacacattagcctaggcctacacagggtcaggaccatcaatatcgcactgtcttctactttcacatctgttcccactggaagtcttcaggggcaatactatgcgtggagctgtcatctcccatgataacaatgccgtcctctggatacctcctgaaggatctgcctgaggctgttttccagtttttttttttttttaaatttatagctagaaggagtgcactctaaaataatgataaaaattatagtatggtaaacacaaggcaataagaatattttgattccattataatcttatgggactgcagtcatagatgtggtctgtccttggaaatggtatgtggcacatgactgtgcttcgtctgcctctatcctctcaatcccaagcgcctatttctctaatagtcagaggcactgacagaaagtcaacacacgcattctgactgagctgcacagtactgaccctgttagtggctctgaaagtcaaaaacgctttagccttccatcactaatctcattcctcttttgtttgtttgtttgtttctttatttatttatttcctgagatggagtcttgctctgtcccccaggctggagtgcagtggtgcaatctcggctcactgcaacctctgcctcctggattcaagcgattttcatatctcagcctcccagatagctgggactacaggcatgcatcaccatgcccagctaatttttatatttttagtagaaatggggtttcaccatgttgaccaggctggtctcgaactcctgacctaaagtgatcttctcacctcgttttcccaaagtgcttggattacaggcatgagccactgaacctggcatcattcctcttttaaagcttattcaaaccaattactttcattgaacttgccaagaattaaatggagaggaagaggtttcatgttaatcaggactcctctttcccagcttcttgagtcattttgcttgagaacaaatatgatcaaagtgcagagtgaaggaaaggcatacgtagaggaaagggggcttttgtatgccaagccctgttcccacacctcatatcatttaatccccaaaccataccaatcaccccattgtacaggggagatactgaggcttacaggacgtagcctaatcccctgcaggaaagaaggtgtggatctggaactgaacggggtggtctgggaagaccacctcgatgaggtgacatttgtctggaggtcacgatgaactgagaaaacaaatgatatgaatatttagaggaagaatcttccaggagaaggcagtgaagagtgcaaagatctgagagtgagcaggcttggtaagttccagaaagagcaagatgactagtggagtggggtgagaaaaaaaaaatgcagtgggtgaggtcagcagggtggaaggggtggggcagataaggtaaggtcttgctcgattgtcccctgcagtcacacatatgggactcaccccattccctctgcttgctggtccctgtccaccccacatggtagcatttcccatgctgagtcaaagtggtctcttcacatctgtatttcccccttgactgaattccctgcatccagctttgtattctggctcccaatggagtcttacctacaggcaggtccctttgcttgagccggggggcaaatgaagtttcttgcacaaaatcagattatgctggaatgcagacacatctacaaaactgtgcttcgtaaaactgcatcatctttttcaagaatggtcagtaccttcctggctgctctctgcttgtgaaaaactgagtattttctattcctctttgaaattcacatggaacataccagcatataaaaggccctgggaattgtggaatcaacagactttattttgttgaacctacctttgatttaaaaaaaagtttgttgagcattagaattttcaaaagacatatggctttctagcagaactagttttccagggaaagcaatttggaaaacactcagttgagtggagcagcagcaatgggaatcaagaaatagatttcgtgagacgtgttcattctttacaaggcctaggccttttaatattgccagtgaagggtaggaatggatgaactttttcagaatgaattgattaattcattaatcattaatgaattaattcatttaattaattcattaatgaattgattaaatgtgtattcttaaaaatatagggaatttggttagggaaccacagctcttgcgttagatgtaaattgctgtgtaacaaattacaacaaacatggcagctttaaaacaatacacatttataatcccacagtttttgtgggtcaggactctgggtatgggttaactgggttttctgctcaagatctccaggctgaaatccaggtgtgggctggactgcactctgatccgagtttcagtgtcccttccagttcactggttgttggcgcaattcatttccttgcagcggtagaactgagaatcccttttctgctcaccgtcctccagggacagctttccacccctagggggcgcccacagttccttgccatgtggctttcctagaccattcacaatgtgacgtttactttctcttttttaatcttttttattattatttttaattgacgcaataatcgtatatatttataggttagagcttgatattttgatgaatgtatacaatatagaagatcaaatcaggataattagcatatccatcatctcaaatagttatcatttctctgtgctgggaacattcagagtccactcttccagtgatttgaaaatatacagtaaattgttaatgatagtcaccctatagtgctgcagaacactagaccttgttcctcctatctagctgtttacccaccttggttttccctcctgcccctactctacccaccattccctgcctctggtaaccattattgtcctctgcttttatgaggtcattttttttagcttccatatatgaatgaaagcatagagcattcatgctcatgaaagatgagatttatctttctgtgctagactcccaaagaaacaggatcagcacctgacaaccgctgagctttcttttgacctttggatagtagttgacagtttgttttccttctgcaggttcattgctaggatttccccataatgcatgtgttccagtggggaatgtggcacatcccaggcaaggtcactgaggatttttgagcaatcattttctccaggtcactgtggtcaccggggcatagaaggtgaaatgctccagtctgtaactggtctagattggtagtgatggaaaaacattcttattgtcagtgcccagccactgggcggtggggggggaatgccagctggcaggggcactgagaacaaaaccaaatggatagtacgatgaagcaaggatcaccaggtgcataaaaggagaaacaactaccatttatcgaaggccagtaatgtgccaagcattgtgccgagtgctctttttgcagatgagaaaactgagtcttggaggttttatagctcatccaacgtcacacagctaggacacggtaccagggtacaaatatagactaacacaaaactcaagttggaacacaatggttgcacattaaatcattatgtaatgcaaagagctggcctagaagatggtaataaaatggcttacatagtccctgtcgtgctggaaaagtggtatttataagcaagagctaagcttgcctttaaatttgtcaagctttggaattgagttactgtttctggacatgtgtcacacctatacattgagatgatattctctttgcctggcaaaataacgaataagcaattgtaaagtcttttgatttttgtagggaactatcataagccttcctgatcctccctaatcagcaggctaagtcagtttgctgccatacatagaaggagcaggttttggaagagacagttgccagctctgccggtttttatgttagtgttcagttagctcacctataaaatatggataatatccgccagattgtaagactcgaatgaatgatttaagttcagtgcttagtaggtattcatggctataatatcctcactggtgtagcagagaagaggaaaaagcaatttattctaaccgtggatgctgagctgtgtatgaaatgtgacttgatttttttgggcagtggagcagtgggggtgggtagctgctatcttccagaaagggaaatgtgtgggatgatgaagaaagtactaaactctgtacccaagaactctgttcaccatcttcccactggcctctgggcctcagtcttctaatgtgttaaaatgaggcttttttagataaggtgaagtctgcagggtatttgttccaaaggatgggtgtagggggttaataattaaagcatgctgtgatccaattagggaaacaattgcaaagcaaattaaacagattattgttattatccttagacttctcagaacctttaatgtgccaatgtgtgtgctagctctcctagaaggggcgtggtagagagtttcccaaactaatttgaaagatgcattagaaacattttatttccatcatccccaaagctcctcttgacctgaaattctatgattctaatatctacgtcatgtagaatggctggttctttagaggacagtaacaacatttttctagttttgacttaggattttggataaggcaaattctacttcctgttacctctggagacatacgcagtcattcagttatctctcttgcctttgaactgggtatacatattcagttggattatttatctctggatttgaaaggattgcatttaattttgaatcaaggggaaagtgatcgtggtgttctgagtcactagtgaagccagttacaagccagcctcaaagcaagcacagtcttgcactgattaggaaacgttgagagaagatggcagccagaaatatttgaagctttaacaccaaacagttgtgacagcaaaggtctccaatttttgcttttcatcttaatattatctttatttataatatttttaaatgatggaactactaaactgaaaaatagtgaaagctactaattattaaagtgcttaccatgtgctgttgctattctaactgctcttcttgcattatagcctcagtttcatccctgagagacaggtcctattttctccattagccaggcaaggaaacgggcagacaaagcagattttctgaagttacacagcttagaggagagtggtccaaatcccgtcttcatcagttcctggccatgtggctctggccaactggcttatttgctttaaggtttgttagctcttctactaaactggaataataatgaataataataacaatgataatagtttctaaatgacgaggtcgttgtgaggattaaacaagctattatatttatggaatgcagtgttgcctgcacagtcaatactcaaaatctgctagctattattttaaaattatggttattattactatattgacatgtatgttaggaagctgttattctatctcagagataatgcttttaatataaaatataaatataattgtgtgtatatgggataggtataaatcttaagctattaattcactgttatgcctttttaaagtgtgtagattatgtagtcataagttaatacctatagctttcattctttttccaatgaaataaagctgttcattaagagcgtcatgtgaaccaaaaatttggaataaaatcatattgaattgtaccagagtaggaactctcatagagtactggtgggcatttgaagttgcaaaaaccatggagagggaataatttggcaagatctagtaaggaggaggctgtgcatgcctgtgacctagtaattaatatcctggagggactcacacatgtatacaaggagacttgggcaggaatgttggtggcagaaggatttgagatagtaaaaaatggaaaccaactgaaggttcagcaactagataaaacaaatgaattagagctctaagtactggcaaggtaatatcataaaagtaaaatattgaattaaaaggaaattacaggaaaatatatgcagaataaaatctgcaaacagtatcataaaactgatcatgaacatattcatatattgcaaaaatatcatacaagcttgaaatagtgaataccaaattcttgaattcagaatggctgttgtttctggataaggaggaacaaagatgggtttgctgaaaagaaggcagtgcaattcaactgcatctgggatgtgatttttatgaacgtgttggggcatgaatgaccaatgccaagatttgacaaagctggatggtggctgcttttttgtatgcttgaaatgtttcataattgtaaaaaaatcccattttattacttgttttgccttctctcctctttttgtcttcatctgtttcatagtttcaacagacttagcaccttatgtctaggtgtacgttttgaggggacagcaattttttgtgctacaaactttctgtaagaggtcttggacttagggattccagttctcagtgttagaccttgttttctgctgggttcagatgagaggtcatacagtgcaagctggggcccaagttgagttaattatttaataaggcttccacttagtctgtgtaaactccacgagctctcctgatggccaactcattcacactccttggcccacagagggttcagaagggccaggaggtgagacagttggtgagaacaaacggcatccttccctgctgtttatcagtgtttctgctgcttgctcaagtaatcaacagcataggtagggcttaaagaggaaatccggtgcctgcagaattatgactgacctattgaggaaaggttcagagaggctggggagtttgtgaccttccggttaaagtgtgacttcaaccaaggcagaccaggagggtgggtgaggcatccagttcatagatgagatcagtgtcaacgggtacaaatccagcagggtgactccatgcgtgtgtgtgtatatgtgaataacacaaagcatgtcatgaaatagatgcattaaatctgaagtatgtaatgttgtatataatgtcttaaaagttcccaattcagcacaccatgaaatgtctaaccatgacaattaaacaatgaaatggctcgacaggaagggcttttgcattccttacagaacttacattccaaaaaagccaggtggagacataaaacaatccttcctcatagatggtttgtgttgtgttggtttattttattttattctattttattttgataagaacatgtaatatgagatctaccctcttaacagacttgtaagtgtacagtagaatgttgttatctatggcacaatgttgtacatgggtctctaggacttacttatcttgcataactgaaattttatatttgttgattagcaactcccatttcctcctccttccaaaccctgttaacctacattttattcttcatttttatgagtttgactgtttagctagctcttataagtggaaacatgcagtgtttgtccttctgtgactggcttgtttcacttgatgtaatgttttcaaggtttattcatgttatcacatatttcaggatttccttctttttaaaggctgaattatattccgttgtatgtgtgtgcatgtctatggaatataattatacatgtacacacatacaatggaatatatatatatatatatatgtatatatatcacatttactttatccatttaccctttgatggatatttaggttgtttccacatcttggcaattgtgaataacattgctatgaacacagtagtgcacatacctcttcaagatcctgaattgaattcttttggataaatactcataagtgggattgctggatcttattatgaagcaaaattagacaagtgggactacatcaaactaaaaatcttctgcacatcaaaggaaacaataatagagtgaaaggcaacctacagaatgggagaaaatatttgcaaattacatatccaataagagttaatttccaaatatataacttctacaacttaataccaaaaaagaattacctgattaagagacgagctaatactttaataaatatttctccaaagaagacatacaaatagccaacaggtatgtggaaagatattcatcactaatcatcagggaaattcaaataaaagccatgaggtatccacctcacacctgttaggatagcctttataaaagaaaaaaaaaaccacttgtgtgctgttggtgggaatgcaaaatggtgtgcagcttctatgaaaaatagtatggaagtttctggaaaaagtaaaactggaattaccatatggtccagtcatccacttctgggtttatttgttttaaacacatgcatgtgttcacacacacacacacacacacacacacacacacacacacacagcctttttcctttttagcttatttattttgtttcatatgaggaattgagaaagcaccatggggtactggagccatggtggtgatagctttctagaattatctgagactaactgtgtggtcagaggcatttctcatctttgttcttgggccagttggtctgacgaggtgagaagctggatggggagccccctcttcagggaattctatttcccacttcaagagtgaaccgtagtcatcagcccatgggctttggtgtctgagagatgtgagttcaatttgggctctttccagttctacaacttgatgcaagttactcctctgagcaataatattcccagcttaattaataaattaattaataaatgctcaataaaaattatcattactgttattattttattaatttcatttgtaaagcaagtcttctatgtaaccttccagtgaaatcaggaaagaccctactgtcataatttaaaacaagttttgtaaaacttaattttcattcctttatcattggtaacattcacatggttcaaaagttactaaggctatcttccccagggccttccatggaggccttcactgtgttatgcctttttaaagtgtgtagattaggaatatgcaaacaaacaagcacatacatgtaccaggtagttacttactaagtagactatgtgagcactttgctttttttggtcacttaatgtttctgggagatatttcctttttgttacataagaggtgaagtcattcttttgtatgactgtgttgtttgacaaatggattcttttgattttttgacttttctttcagtcttcttttgcagtggaatacctaggagttgtgttgtatttcttcattttactcatttatttttcttgtctgtgcctcttgcactagctgagccttgattccatcatgatcgagggattccaccaaattcactatttgagaagccctgtggtgtgatgcatatcagggtatatgccccaggaaggtgagtttcataatcaacgttgctgattacaatcaatgtttcataattaatctactcaggaaataatttctgagcatctattatatgccaaacactgttctctaggctccagggacacagaagaaaagatgatatggcccctgaccccgtggagtttatggtggagcaagggagctataaagtcatgtagtaactacaaaaaaagcctggcagatgtcgtggtgggtaaatagaggaggccttaagcatatagggcagtggttatcaaacctcagtgtgtcttagtattccttggaaagcttgttaaaattcagatgactgggctgcactccccagagatttagataaagtgtgtttatgctggggcccagaagctacatttttactaagcaccacaagggattctggtgcaggctgttctgtagacctcattctgagaagtactggactaaaggttagtaaagaaaggtgggccgggtgcggtggctcacgcttgtaatcccagcactttgggatgctgaggtgggcagatcacctgaggtcaggagttcaagatcagcctggccaacatggtcaaaccccgtctctacagggtctacagaggacagcccctcctctctgaggctgtgctttgctgtgcttgtgaaggtttgtgcctcctctggccccgagtctcattcacacccacctgtctattcctgttggtaggtgagccctggctctagcttgggactcaggccccatgcatctcattttaaaacaaatgctctttgtattttgtaaaaatacaaaaattagctcaacatggtggcgggtgcctgtaatcccagctactcaggaggctgaggcaggagaatagcttgaacccaggaggcagaggttgcagtgagctgagattgagccattgtactccagcctgggcaacagagtgagactccgtctcaaataaaataaaatagaataaaggtgtattagtcagttttcacactgctataaagatactacctgagactggataatttgtaaaggaaagaggtttaactgactcacagttccgcatggccaaggaggcctcaggaaacttacagccgtggtgtaaggggaagcaggcacattttacatggtggcaggcaagagagaatgtgaaggaggggctgtccaacacataaaaccatcagattcatgagaactcactcactattatgagaaaagcatgggggaaactatccccatgatccaatctcctcccacaaggtccctccatcaacacatggggattacagggattacagtttgagatgagatttgagtggggacccagagccaaagcatatcagaagccttcctggagaaggtgagggctaagctgagatctaagaaatgaacatgaatttgccatgtaaagaaggtagcaaaagatcttctagtccattacttctcgaagtgtggcccacagactggtgtctgtctgcagactgtttatcgtcagtccccatcaagataggcacagaaattcagtgtttaaactttatgtggcaatttgacattgtaacgacaccccagcatgtgattagtggattcatcagtggactcatctatactgtctgagcttggtgtagacctgcttgggtgatgttaaattcatgagggcatcacatgtgacacaaactgcacccttgtcctgtatcaagatcacatgtatgtacaggatggattggaagttaagtccagcaaaaagtcccagtgctggttctgccccaaagacgggtttggggaatattgttctagacagaggtacaagaggacagctgctttggaggaactggaagaggtttagtgtgatatgggggcctagggtatgagaatgcaagtagtaggctgtaacctggaacagaaagtaaggcgggcaggttgccacctgattgagaaatttagaccttgtgcaagtggctatggaaatccactgagggaacttaattgatgtttttaggcacgaggcccttgtgtttagaaattcattataaccctcctgtgtagttgggtttccctgttacctgcagtctattttcaaagccaggtaagagttgaggaagtagcaagattatgaattcccctaagggtttactgtttatccagtggtttgcttgattcctccatgggcttctcccatgacggcccctcctctctgaggtggtgcttgtgagggtttgtacctcctctggctacaaaccctcattcacacccacctgtctattcctgttggtagataagccctggctctagcttgggactcaggcctcatgcatctccttttaaaacaaatgctcttagtgttttccacataccataatgctttgaaaaaaaaattcaatattttatttaaaaaatttcaaactataggaaagttagtagaataacaatataaatacgtttttacttttcatctagatccttcaaattgttatcatttggcacattggtttctctccttataacagatactgtatattatgtaatatatgtaatatataatgatataatatatgcacacttttttctgctaaatcatttgggaataaatggcagatattatgcccatttactcctaaaaacttcagcatgtatcttctaagggcaagggtattctcttacataagcacatgcactgatcacgttaaaaacatttaacattgctacaatgctatcatcagtagagtccatattctgatttgctcaattgctcccaaaatgctatcttaagcagttaattatctgacctaggatccagggtcacatatggtattagttctcttcagtcttctttattctagaatagtgtcttagccctcctttgttttttctgatactgacaattttgaacagtacaggccagtcattctgtaggatgacccccagtttgtgtttgttttctggttctttcctcctgattagattcaggttaaatagtttgacagaaaaactgtaggaatagtattgtgttcttggtgaatcatattccagggtgtacagtgccagtttgtccctttattggcaatatgcattttggctgcttggttaggtggggctttgcaactttcaagatgcaagtccctggaataagtttattgccatgattgtttccttgggtacaagggttgccttagagtatgtctttctctgggaaggcccttctttactcctttctaagagggcgggtctctgccagctctgccttaggacacatgatcaatcggtcaggtgacttctcccatctccaagagcctgtgttctagtgaggagagacaggcagtaaacatgtaaatgtaaatgatcagaataaatgagtcaattccagattatgataagtgctgtgaaggaaataaaacaaaggaatgggacagggttaggtaggggaaagttgccatccataaaaccaagttcctgccctcctggggtacccattgcaatgggggacatcaaggataacaaacatatatatagcaagtcaggtagtgctgagtgctgagtgccctgaggaggaatgaagtctgtaaggagagaggaatatcctgaaggattctacagagggggcagagaaaacgtcgttcaggaagtgacagttgagtggagaaagaaataaagcaaggacaagccctgtgagactcttgggggagagtggggcaggcagaggcacctggtgggcacagagttggaggcagcagctcttagtgcagtgaaggaaaagaaagaggctgggctggtttgggaagtgggctagagtgaggaatgggctggagtagggagtgggctagagtgaggagtgggctggaatagggagtgggctggagtgaggagtgggcaggagtgggtagtgggctggagtgaggagtgggcaggagtggggagtgggctggagtgaggagtgggcaggagtggggagtgggctggagtggggagtggggagtgggctggagttgggagtggggagtgggctggagtggggagtggagagtgagttggagtggggaaccaaggtggggccagggccagaccctggaggcttttcagacctttttcaatggtaacgacattggcttttatattcatatagagtttgggaaaccgttggggtgttgagagcagggagaggcatcatccacgttttaaaagtatcagctaggccactttgtagagaaattgatgaggtgggaaggattgggtccaaggtcaaagtcaggcatctaattccatttcaaatcctaagtttcgggatgtatgggaaaaagagacacgggagagggagagaagtggcctcttgagatccagaacaccagaccagggagaggccagcaggctctgtctcagataaggggcaatttctgtggtcagccaaagccgcatttgaatctcaaagcagaaaacccagtatctggaagaaaaacgaagggggctccatgggaaccgtgaccttgttctgttcacctgtgcctccccaatgcccactaagggatgctcaacaaataaatagatggatggatggctgaatgaatgatgcaacacattagcttctattattattaatgttcaagtatggaaacccatctcctgagggtgaatttgcaccatgtcaatttagctaaagtgggactacgtttcccggagtttgctttcttctctatcccctgctgggagttgcctgcaagagaaatgtgcacgtgacttagaagagggaagtgaggagccggcagtttgaagcatctgggggtcagcatggaaccaacatgttcgcagctgccgcaagctgtggcaggtcagcaggctcatcttcttggcgctgggcagtggctccgttcctggctcctgaagcccctgttgaccaactccttctggtcttcaaatcctggtccaggcagatgtgtaactgcatggtgaggaggctccaccgctcatgcaggtcacatgcgtggttgagatcagagaccacgagaaaagtcacagctgcagtgtatcacgaaggtttcatgctgttctttagccttcctacttcatgcccatcttctcgacagccggttctgctgacttcagctgacttcaggagcggctcccacagtcatacaaaacctaatctcataaaataccccttcaaactcactcatcctggtcctgcttccctgaccaaatcctgaggatgagactggatttaagtatttctcaaccttggagcttcttgggctttgctattgcaaatgttaagtaagaatattaattttaaaggcatgtttatcaaaataactgatcaactcagctattttaataccagcgattctcacctaaacatacggaattgttttcaaatgggtgaatatgtttctcttcaagttttatagatgtttggtaagaaagcaagtttttcttttttaaattgtttgcctaagagggatataaggaaatgtctgtgttcgattttgcaatatgtgtgcgaaatgactttgcagtgagtcgtggaggtgatgaagttcagctggcaatcattggcagaccccgccgcccccccgccacccccactacacacacacacacacacacacacacacacacacacacacacacagttcccctgcttgggagctgtgacctttaactgagttcctgagattaaagtttagtcctagtttgaggctagacctaaaagattttaatttttcagatatatgggggaaagagacctgaaagaaggagagagaggctgggctcagtggctcttgcctgtaatcccagcactttgggaggccaaggtggaaggattgcttgagcccaggggttcgagaccagcccggccaacatggtgaaaccctgtctctactaaaaacacaaaaattagccatgtgtggtggcacatgcctgtaatcccagctactcgggaggctgaggcaggagaatcacttgaactggggagggagaggttgtagggagccaagatgacaccactacactcaacctgggcgacagagcaagactctgtctctaaaataaaataaaataaaaggagagaagtggctgcttgagatcctgaccattggaacagggcggggaggcccctgggttttgtaacagctaaggcacaagctctgtgaccagccaaagctggatttgaatctcaatcatgctgtgtaaccagaagcaattgatgctgcatcttcaagtcttgatgtcctggtttagaatgtgggtgataatcatttctccatgtttgcaaaggtcaaataggactgtataccaaggactcggcacagcatctggtgcccagtgcagcagacaagggatgcctgactttgaccttgctaggtgacctgttaaataatttttctgtgcctcagtttcctcatctgtaaaatggggcctactaatagtatccacttgataacattttcatgaacatgaaatgaataaatggtgtggttaggatggcaaacactagattcaaatcctggctccaacacttaattgctgtgtgacctggagaaaattacttaacatttctgaatctcagtttctgacctacataaaatgagtctggtaataacagttaccatagggctgttgtaggagttaaacgccagcatgtatgcaaagcagttagcagagcctagtgcatagaaagtgcacgttgtgcacatgtaccctagaagttaaagtataataaaaaaaagaaagtgctcagtaaatactgtttattagtattgctgtccttatcatgataattaaccagattcaaagatctgagcgaagggcattgcaggcctaattgtctttaactcatacaaccattcttctgggtaaggatgacaccattcccattttatggagaagccactggaaggttgatagtaggtgtcatgttcatctctctgactggggagctgagctcctaaccacttcaccttactgcctctaggttatttttttgtttccttttctttttttctttttttttttgacagagtctagctctgtctcccaggctggagtgcagtggtgtgatctcggctcactgcaacctctgcctcctgggttcaagccattctcctgcctcagcctcctgagtagctgggattacaggttgcaccatcacaccaggctaatttttatataggttattttttctaagagtacctcctgaggattgaatgaatggagcagcccacttcctctgggatcactgtttctctcactccagggtttgatacacacagggcagcctggggtttgagtgcctgcattgctattgggtgtcatcttttaggacacatttgaaagccaccccctgacacatgggtaactatgtgaggtgattagtgtgtgaattaggttgattgtggtaatcattctcaacatatacatatgttaaaacagcacaccttcaatattcctatttgtcaatcacaccacagtatagctggaaaagaaagcaaagaaggaatagggtgatctctttgtgttgcaagtgatggtggggggaatggtgggtgggtggcgggggggactctgactgatcttcccgatcccctcagtttcgttactctgttgacagtgggaattctgaggggcttctcaagggaaaaacataaaacctgacctttgtgtaattctaaagcaagaccttaatgaaaacttgcttttaataatgaagaatgacagtatcaaaagtcaggaagcttctccatagacgttgcaactaaaatatatatcagtgaagatgcttgttgctaataggcgggaacacaaaacaaaatctaatgtacagaatgaatttcctctttggactcctggcgagtgaaaggtaagtagatgctagaggcattgagctctgtcgattgcttaggccgcatatttcaggactgacatgtattagctcagtgcttctccacaaggacaattctacccccaatcccagcaaaagatgtgtgtcaatgtttggagacctttttggtgtcacactgagaaatactactgtcatctagtagataggggtcggggaggctgataaacattctacaatgcataggacagcctcccacaacaatagcgaaaatctgatccataatattatagtgccaaggttgaaaagccctgagttagaaagatgttaggcagttgtcatcaaatattaacagctaaagaaaagttttttgtgtttggacatgtgtcttagctagggttgccataacaagacactacccattgggtggcttaaacaataggcatttatttttatcatcgctctggaaactggaaatgtgagaccaggtaccagcatggttgggagagggataacttcctggctggcagatgactgtcttcttgctatgtggcagggagagagagagcaagcgagcaaaagggaacatgatgtcttttcttaccaaggcactaatgtcatgagggcctcaccctaacaatttcatctaaccctaattaactcctaacagccacatctttaaataccaccatattgagggttgggacttcaacatataaattgtgggggaggtgctaacacaatcattcattccatacaaatgtaactaataaggttaaacatgtatgtagcatttactcttctaagcgctttacatgtatatgaactgatctaatccttgaacaagtctaaaaggagacaatgactttatcctcattttacagatgaggagattaagtaacttgtccaaggtcactttggttggggatgcagagcctggtttccaacccaggcagtctggctctagggcctgtgttcttaaacttgatgtgaagagtaattgacatactccatccgttgaaacttcctccagttaaaacaaataagaaattatatgtaatgactgcattggcgtaaagaaaaatacaggttggattcattatgacgtattcattatcattattatatttctttttccttctgattttaaaataaattgaaataaaaacatttttgtggtcctgggtcctgacactattcctaatggagaagtcagccttggtggcagtgggtgctgtcaggaacatgatggattgaagaaagtcaggtgtgaaaatgatgggagtttcagcagcctgggaagctgcgcccctgctctggggacagcagttgttcagctccagcccactgctaagaagtggagggaggtcagagaatgagggcttagtattgacaaactggcaaatgttccaattttagagaagaagccaagaatccaaatacaagtgttcttttgagtcaattcagtttctacaaacactattatgaaagaaagaaagaagaaagaaagaaagagagagaggagaggagagggagagagagggagggagggaaggaaggaaagaggaaggaaggaaggaaagaaggaaggaaggaaaaaaagtaacaaaaagggaggaaggcagggagaagaaggacaaagcatcacatttggtaaaggaaatgggctttggggtcagatatgccttggctggtctacttgctaggcatgtaccttgggcaacagatttcgtttctctaaatctcattttatcatctgtaaaatgggaataatactagaatgcacgtttaccaccaggatgtgggtactgaatgcgaattagatttgcatctcattgttaaagtgcggtggcatttcaaacccaaacgggaacttgcagatcagattccagtgctttctggagctagaaaaatggtatatatgggcaaacgagccaggtggggcctgtggcagactggagagctcagacccatctcaaggggaagctgcttggccaattcttgccatctggggatgtggcccatgtcagacacatctcccattttaaacagtagttaggaatctggattgtttgtgaaatgtctcatttatgtttttaatcttagtaatagattccaatttttgaaactacaaactggggctgaatgatacatgcctgtaaactggacaaggcccaggtggtcaccagttcatggcctgctctgaacagaaggcgagtgtctagacagtgtcttcctgtcttataggtgccctggtggcatctgtagacatatctgtagtccaacagggctaagttcttacagatcaggttagaatattaatttagtgatatagctcatataagaaaataagaattttttaatcagttgggtcctggacatcgtgactggcaatgtcagtctggaaaccgaagatgtcaccaggaagaaaggacaaagatgtgtgagggatggagcagggaatagactgattttttttttttatggaaaagaataaaagaggatgaaatagaagaacaaaagattcagacatgcaaatcatagtattctagagaaatttctaggcccagaaatcatgaggaaaataatgttagtttctttttccaccctttccaatgagatttttcatgagggtaggaaagtacttctcttatagaattttacagctgaatagaactaaagagacctttagttttcaagttaaaacatttttttttaaagtaaataaaataagaactgcagtgaagaaatgactggtccatagccatggcacatatgaaaattccaaatgtgtatgaggtaaagctagggctttgcatgagtgagatagaccaggtgggaggttctacggaatggtggaaacaggcaaacaagccaagggtctggcccgtccaagggggctttgttactcagctgtagccagctgtgctaagcagaaagtgggcccaccatagacagatctaactttttttttttttttttgggatggagtctcactctgatgcccatgctggagtacactggtgtgatcttggctcactgcactctccatctaccaggttcaaacaattcttctgcctcagcctcccaagtagctgagaatacaggtgcgcaccaccacgcccagctaatttttgtatttttagtagagacggggtttcaccatgttggccaggctggtctcaaactccggaccttaggtgatccacccacctgggcctccctaagtgctgggattacaggcatgagccactgcgcccgactggcaacaggtctaacttttgaaggcaagagaaaaatatcaactttgagaatgcactccctcaatttttaaaagttgtcaacaaattcaaaagtttaaaacacatcatgcaagccaaaaaagcccatgtgaggtccacatttggctgggaacctgccagtctgtgacttgcattaaagaatcttccagcatcccacacattttctgacaaggtagttctcacctcacttcctgtcaatgtttacctaagtaaggaatgcttagtgtgatcattttcttaactctttatcctgaagaaggaccttcagtaaagacaatattttaatattttacttcggtttcctatattttactttggttgcctccattattcaccaatttgtgcttgttcagccagaaattcaggaaccacaggaaagctgttgactaaagaaaaccttaaactttcatcccagttctgttcactgttttttattaaagagttttctttttatagtaaactaaagagaggatgttcagagtccaggttcatgagctgcagggctttttttttttttttttttttttttgctcagcagaaccccaaaaatagaattgcaaaaatacaatttggtaaatctttaatgcccaaatactactccttcccctaactaagtcagccactggaaccatttctgcctctgcacatgacactgaccaggaggctaagcccattatttatgcacggctgattttatttctcaattcattttgagcatctttaatgcaaaacaacaagaaaaacagcagcaaaacacccagcctgattataagccttttctcctgacttttaatgcaaacttgaagaatgagccagagatgactcataaactcatgaacttcagtttctggtgaagaccatcatttaagacaaagtcagttccccagactgtgggtttccctatttagtgaacaaacatgtttactttaaaatgctaatcaaaaaagtccttgaacagacattgtcttccccaaaattactaaaatagttaccatgtttcaaattatttagaataggaaactaaattataataaaataattgaggatagaaatctaactgatttttcacctattaaaatttgggtcacaaattatacacacacatatacacacacacgcacctacacacacatgcatacacatctccaaaacacaagatagtaagcacgggaaaatttgccaaatgtcctagtggattgatcaacaaacagcccaggtaattctgcatttcttcttggtcgaagtcactttttcttcccaacttctcactcagactaggtacaactaaaatgtagataagtaagtcactttatctgtgttttatttaagcagtacggtggttaggtgcatgaatgctacagccagcatgcctggttcggattcctggttatgccactgttattggtagcttaatgtggagttggtaagacggggatgtggaaatagcagtgtcaattcgtaacttgcttaggaggattaaatgaatgtatagaacattgcctggccctgtgtacaaattcaagactttgagctcagttagtctggagagctagcagattcttaacctttgaatccccagctaaaaaccctgtcctgacgaacgttcatgcacattttgacggcctttcagagatgctcaggccttctctgcctcccttactccccaggctaaggtcctctactctagaaaacacctaaaggaacctggggatgtgagttacatatgaaaaccactttagtcctcctaaggacaccatacatattttctgagccatggcaaaatcaataggtaaacaggtattgttagagggaactaggcctggttcctttttcaatggggtttgaaagttgtattttgtttattaggaaggaaagaagtggacctttccagtgggtgattcatcatctggttccttcaggggaagagagggagtgactagagaggattgatgtccagcctggggcctgctttgctcaacagggacctcatgaaggcaggcttcttcctcctgacatttccagcactcctcacgggcactctggagagggatctctgaatcatcgctgtgtctagacacatcaaagggcaagctgcctgtttctcaggctcaccaaacccagtcaggagcactaacgtggcaggtctccctctgaatcactcagaccagagggagggcgctgagaggtgagcaggttcacccggctgtattcgctcttgggcgagggcaacattcctccctggggaatgcaaagtcatgttgcctcttgccaaagccagtcaggtaaggagacactgttgattttgtctctgcttcctggtgccagagcagaccaagcagggctttgaagatgttgattagacgtaagccttgacgaggaatgtgactgtcattcaacagtgtaggcactcagtaaatacccggggcatgaattcaagggaacgctaccttgcaaaatgggccactcacttcagacaagtaattgaaagaaacatttaaaaattccaagagcaggaaagataaaataattgctttgggttgctcttcggaagcctaatgcaacatacagttaagttttagacttcctgactattcttcacaaatttcttttcttcaaactcatgttgttcttatatctgaatgttctactgcatactctaatagatttgatttcaaccacatcccacacaaaatcatatttacacacacacacacacatacatatacacatatgtatatgtatgcagttgattatggacatagttttctgctttgcagatactttattaaacatctattatatgtgatattgatatttccttttcacatgttagaaatattttgttttccggtctcaaccattttttttttttgaaacggagtcttgctctgtcacccaggctggagtgcagtggcacgatctcggctcactgcagcctctgtctcccgggttgaagcgattctcctgcctcagtctcccaagtagctagtattacaggtgcccgcttggctaatttttttattttatttttattagagatggagtttcatcgtgttggccaggctggttttgaactcctgacctcaagtgatccgcccacctcggcctcccaaagtgctaggattacaggcgtgagccaccccgccaggccaggtcttaaccatttttgtaggccctgtgaaattctgatcctgaattaaatagccctaagattgtagaaatgaataacctttaatggagtgtatgctttttatggcctcatcaataaatgaatttattcctgacgttcttctaaggctaatcactccaaaggatttcagagtttatctacttgaggttatttacttgatacattgaggtggttccatcctgtaactggttaagtggatagtgtactgtttggggctgttgaagggaggaatgtagctttcattttctaagcaccgcaagagaaatggagaggaggtcctgtgtgtgccctgagatcccgaaaggggaattatgaactgcgaggagcatgtgcttcaaatcgtttgcaaatttgggccaatgagatgctctttaaaatgtcatcctcaaaagagggcatcccattcatgggtctctgtatgagcagccctaaaaagcaaagagccagcatggtagctcctgcctgtaatcccagcacttgacgaggctgaggtgggaggatcgcttgagcccaggagttcaaggccagcatgggcaacatagtgagaccccatctctacacaaaacttaaaaattagcagggcatggtggagtgcacctgtagtcccagctaccttaggaggctgaggcaggaggctcccttgagcccaggaggtcgaggctgcagtgagctgtgattgtgccgctgcactccagcctgggcaacacagcaagaccttgtctcaaagaaaaagagcagactttcatttctaattggaacaaaagcccctctaaaggcgctgacagctccttgtaggactcctggttgggtgatgttggaagaccagcattctcctgaggcaggaactgtgtctgcttttctgtccatattacactccccacaataagcacagtgcacggcacatagtaggtgctcaataaatccttttatttaccacttgtctggagtaaagcattataatgtagtcattacacgtgtggcttcggagcctgactgctggggtctgagccccagctctgccacttacctactgtgtatctttgggtaggttacttctgcctctgtcttggtttcctcatctgtaaaagggggataatgaaagtacctacttcagtggatgattacacttccttcacatgcatttacgagttttctgaacatataatcctgttgagatccatgtggacttgatgattctaattatttgtcatgcattacactcttcatgcttttggagttagaatgtatatatatatttataataattttattttcttcttaataaatagtgcggacatttggatcaaggaaaaggagtgtgtgtgtgtgtgtgtgtgtgtgtataatttttaaaaattgctggtaagatgtgtcaagctaagatttaacaatctgtgatctgcacatctttagtttgaggaaacaagtcacgttttatttcattttaattttaatttaatttaatttaattttattattattatttttttgagatggagttttgctgttgttgcccaggctggagtgcagtggcaccatctcggctcaccacaacctccgcctcttgggttcaagcaattatcctgcctcagcctcccaagtagctggcattacaggcacgcgctaccacacctgactgctttcgtatttttagtagagacggggtttctccatgttggtcaggctgtctcgaactcccgacctcaggtgattcgcccaccttggcctcccaaagtgttgggattacaggtgtgagccaccgcgcctgacccacattttattttttaaaatgtgaaaccgtatcttggtcatgtctttagcagcatggaattttggaaagatgatgacatttgaggaaaggaggtgaaggaagagacttgagtttaaactggcaccttctaatttctctgcccccaaaaaggtattgatatatgtgttttaattgttgccaatatgtgtctgaaggttgaagaacactcagagaaaaaaatgaaaaaaacacatgtgtttaaagtggtccataactaaaaaaaaaaaaaaaaaaaaaaaggtggtccataactgaaagcagcctggaaatggtcatggaggtcatggaggtagtgctctggggtgcatttcactaagggctacatcatcccttgaggtttgcaaagctggtagctaaggaggatgaggtaatgcagggatgttcatctggcacatttcatctcaagagctgatcatctttaggtcgggaatgaattcctcaccccatatagaatattacagagttggctcaggtggacagagaggagagggcaaagaaattttgatgttctcaaggccaggaatgttgcccttatatgggtttccttggaggagtcggctgtgtgtgcagcttgttccttacttgaggtgtatcaagacgttcaccacaatattcagtaattaattatcccaatccacatttaggaaacagcagaggacactgtgacattatctaacaatctctcaggtcactgcagatgaaactagctttgggacataggcctcaaagattcctgtgtgtagcagtagctcattagcccttttcaagagaaatattattactgtcaaatcagaagcttttgaagccttttggtgctattctgtctaacacataaaagtcttctacccagggaggcatagtatttggtttgtacagaactgtttctcaaagtagttacttcatttgccttcaaatttctcctctattttcaccaccacttaactgttggccaattggattttttttaagtttctttttttttttttagtttcttttttttttttttaaattgtcttccttaaaattaccagcatggaaaaataaactattcccaaatgcgtgatgctgtgaatctgagagttcaaatgcagcattagtggaggttgtggttgatgggcaagtagctcatatgtcttgggataaaatgctcctaagaaggaattttggccccattcacaggaggacacttttttcctcattttggctttttttttttttttcccccggcctggacacaaagtccctagtaattttatcacaactcattttgggaatggtgattcctgggccataattgatttcaggagttggtaactgggctgcaaatcaaacacgtgggagaaaatatcttaccagtattgtcgaagccctttggtttatgtgctttggtaataaaatcctcagcaggggagttcaacaccatcttttggtttctgtttctaggtttcttctttcttgcttgaggaatgggttagtatgtgggtttgtgcaggagattcagagagagggcctaagattccgcttaggcttcatggggttcacatctttcgatttggggcctatttgatggctttgctttattttaaagtgttttttgtttcataaaacttatttctttcttcttagaggtcatttgtagagattgcattaaggcttacagttttgttgtctggtagaatgctttgtcttctttttaaaaaaggaactggcctgctagcttggcattagtgtgtaatgatgacatcatttatttgtctctataggaaataggcattcattcctttttttttttttttcccagaggggaatgagttcatgttgagagtatatgataggatgtattctccctggttatcataagcggacgcattttttcatttacttggaagatctttctgaaacataacctgtgcaaaggactagggttatgggagaaattataacagacaaggctgctgttctacagaagcccttcgtctagtggtagtgggggcacagatgagcacacaggaaaatgcagaaagataaatgctaaagaaggaggccttacccaaccttgggtctcagggagacctcagggagggagtgacagctaaggggagatcggaggggtgagtaggagcgggacaggtaaagacggggtgggagagttaggaatttctgataggagagaacaccccacagagaaggaattgcaagttccaagtccaggaaagagaactttaattacatttttcaaagtacttatacatatgttatgtttatttattttgtaaccttgagttatacaactcagagtctcagttttcttatctgaaagatgggataactatccccatctccaggggagaccgtcaggaaaatccgagataactgacagagcgttcctcgttagctcacagctgtttacgagtgtctggcacacagtctatgcttcataaaagaaactgcctttactgttgttcttacattcttcttctctatcttaatgtttccctttgcctaatttgtcctacctatttttaaattatttaattttgcttgaagtatttctctctctatcttttttttaattgtagtaagaacatttaacctcagatctattattttaacatttttttaaacttttattttaggttcggggtacatacgcaggtttgctatataggtaaattcaccttatggggggttaatttcacagattatttagtcacccaggtattaagcttagtacccattagtgatttttcctgatcctctctctcctcccactcttcaccctcaggtaggccccagtgtcggttgttcccttctttgtatccatgagttctcatcatttagttcccatttataagtgggaaacatgcggtatttggtattctgttcctgtgttagtttgctaaggataatagcctccagctccacccatgttcctgcaaaagacatgatcttgctctttttcatggctgcatagtattccatggtgtatacgtaccacattttctttacccagtctagattttaacagatttttaagtgtacaatacattattatctatggatactatgttgaacagtggcagctctctggaactcatcttgcataactgaaactttattcctgctcaatagtagctccctgttttcctctccctgtagtctctggcaaccccccttttactatctgatccttagaagtcctcctcacacaccgtataggggcaggatatagtttcctaccccttcttaagacaatcacaggcaagagcactgtcacttacatgaccggttaagagtaagtagtgtataccctgtacacattgtgacagcagaaggcggggagattgaaagaattcagtaacacaggggttctgccagcacagaacagtgtccactatgatcttttttaacccaaatgcagcattatgcggagtttctctttattttaaagtgaaaactgtgatgtgactagtcacacctgacttcagcgcaccatctaatgagagcctctgtgtcagaatgaattgagctataataactactaaattgactcataaggacttacaccaaaaggagatctatcatcctacagaattagaaatgcagagggaggatggccctgaggatggttaatttagcagaaaccaacatcactaaagattcaggaaagttccatcctctttttccattttgatatcattgaagccgggagttcactttgtgtcttcgttttaaaaaccaggagaaccccagagccctaagaacaccttccctcacaattcactgaccagactcaaatcatatgcctcctactgaatgaagaggaataaaattatcagggatggccaaggctttaagcaagacacgaactctaaggatgccgatggtctgtacctactatgagaacctgatatctgaagttaggattccactggtaagaagaaaaagggattgggcaatggctagtgggatacacttatcatatctacctgatacacattttctttatatttatttgtgcaaaaagaaaaacaaattctctcccctttctgcttagaccagggaggtccaaggtatttggaaagaggagaggttatgccaagtaaaaacaagcccacaaacctccctaggagagacacacgcataccttccacatccggatcagggtgctgatgatgatggtgatggtgagtggaaaatctcaagttccccacatctgccaaagttggagcagctgctactaggagggcaccagatggtaggtccttgcttcctgtactgctcagagtcccagcagaaaacagaattccattcagatgtttgaccagagacttttttctttccttttgaaattatactttcagttctgggatgcatgtgcagaacatgcaagtttgttacataggtatacacgtgccatggtggtttgctgcactcatcaacccgtcatctacattaggtatttctcctaatgctatccctcccctaaccccccaacccccggacaggccccggtgtgtgatgttcccctccctgtgtccacgtgttctcactgttcaacccccacttatgagtgagaatatgaggtgtttggttttctgttcctgttttcatttgctgagaatgatggtttctagtttcatccatgtccctgcaaaggacatgaactcatccttttttatggctgcatagtattccgtgaagtatatgtgacacatttcctttgtccagtctatcattgatgggcatttgggttgtttccaagtctttcctattgtgaatagtgctgcaatgaacatacatgtgcatatgtctttatactagaaggatttataatcctttgggtacatacccagtaatgggattgctgggtcaaatggtatttctggttctagatccttgaggagaaccagagattttttttagttactatttctaaaggcatgggtaggttaagaaaactagcaagggaggatgagacacccaagactaaccaccgtgcgaagtcataaggaaagcttagcctgaagggccaagaagatgaaataatttttgcagatgctaagtgaaactgaggcagtgaaggaggggcctttgggaggagctgtagcctagaggaaggaagccagtgccagacacgtggccagagaggccatagaggcagggctctgatctctctcacttctcagcctctgatatccagctggtgcctgcttccattggctgagcccaaatgtaggcactggcaaaggagctggagcccagtgatgcccatgtggaaggcagcctctcggggctagaggagggcagagacggatctagttgggaggacaaacagatggatgggctgatgtgatcccagacacgctcctccaactagggcattctttctcaagagcctcgattccaggcagagccacatggcgtctcagagtcagtgaatccacccgcagtcagcaaaggagcgcctttggctttgttttgcttctgcatggcttgtcttttattcttctgctcagcacttctccttctcctcattttcctctctcctgcttttctcttctttgtcttctgtcttcttctttgtcttctgctcagtatctctctgattcttgaagcctttctcagcctaataagggccctaaacttccactggaatcatggagagctcttttctgtccttttttattttttagtgaataagagtcagattcaggtaggacaggtttaattttgaaacttgaaaaattgctcaggacttcctcttcaggatatgagcattggtcttaaatatcaaaagaaaacaagatttttggtagggttcttttagataaatgcttactacttacaacatataggaagaggaaaaaaaaaacaaaaaagtgataaacattataaatagtgtatttcttcacttcctttaaccatcatttgcatatttgtgcccagtgtccaatactaagtgttgctttcaccactcaagtgactcttgggacctgtcctgagagctgtggtttcaggctggatgcaatgaagtctttccaattgttatacaattgactgtgagctacttaaatctgccacttattaagaatgactggttatgaatcatcccagttcccaaatatgatgatgaatttgtgattactctgcaacagttttcaaaacaagatctcatacctttcatcaggaagagggaaaatggtttcattttcaacacaggaatttgtttccctggttgagacataaaacatgtgtcttaatggttctgcaatgtgctgggatttactctgaaaggatagtgattcacgaagagatggagtcgggtttcacatcctttgaagtctagggttgcccaattgcagtcatggagcaacatgcagctgagaataagagccaactgttcctgagtttgtctttaacggttaaacatgcctcatgtggtgtgtcaaaagcttataaattcataattggggcaaggctgctgtgggtttagttgccaataatgtgttgatgttgggttcagagtgcccaattaggatggaacataaagcaatgcatggcaacgaatgaatatgagatcactcatgtttcagtggaattttctttgaagatccacaaaactggagaaatggctgcccggataacgctgacatcaccatgtggccatattcagagggctgaagaagtcctgacaaactaaagtggggtgcttctgaagttccctaaataggattggataaagtgtagggatagagagatggtcacatgcaggattccttcccacctccttcctgtcatatcagaatacttgttactgtggctgaagtgacatttccatccagaagccaggatctggtttagctgtgcttgtcttccttcccggagctgagtcatgaatggcagtttgggatcctccaaagtgaaaggtgtcttttgttcagccactcgaggctgctctctcactgtgctcagttacagtttaactggcatttccttgtcagtactctgtgctgttgtgtaaagcagattcaagctattctatttgcttcttcttatttgtccactcacacagtcactatttatgatgatccttctatgatgaaggcactatttgagatgcctgaaaacacaaaagtgagcaagataaacgaggtcctttttctattctattcttgttgaggagctagataagtaggcaaatggacaaactaataaaataattttagacagtgctatgggatatgaaggggctaagaagggatgatggtgtaacataatttgtgagagttgcgcgatggccacattagatgaggtggttctctctgaatatgtgaattttatcctgagatctaaagaataagaaagagtcagcaatggaatgatctagaggaagagtgttctgggtaaaggactcacaattggaagagtcctcaggcagggaagagtgttctgggtaaaggactcacaattggaagaagtcctcaggcagggaagagcttggtttattaaagaaacaacaagaacatcaacagaatctgtgtggctctgctccatgagaaagagggtgggggataggggactatgtcagaaagcaatgggagctggttatgcgggccatggtgagaagttgggatcttgttcaatcataatccacccaactgtgttttcactccctatacttccactcttccctccctatactttctctcttccctccttatccatctccttatccatggtttatcactaaaatcactcccttgaaaatatcctgtcctttggtatgagttatctattgctgtgtaacaaattaaacaaaaaatttagcagtttaaaataagaagaatttgttatctcacacagcatttgtagatcaagaaaccaggctggcttagttgggtgattctgcctgtaggtatctcatgagtatagttatctaaagatcatactggggctgggggggttcacttccaggttgactcactcacatgcctggagagttagccctggtttttggcagggagccttagttccttgtcatgtgggtctttccataggacttgttgagtgtcctcatggtatggtggctgactttgcccagagacagtgagccaagaaaagggaaggtgaaagtcactatgtcttttaggatctagttttgaaagtcatatatcattgtcttcataatatctaagtagtcctaaaggctatccatactcagtgtgggagaggagaaaatcacacaagggcatgaataccagaagacaaggaccatggcaggtcatctcggaggcttgctaacacaccctatcaccctcctttgttcaaatcttgcaaaacctcagccctgagaaatctaaagcatggcgctaacatctaacccattgaaaagcataccaacatgctgagtgaactcattttaagttcatgaccacagacatcaaatgaaaccttagtgctgtctgactatccttctacatgcctctaggcaatttattcttttcctagggtgactttcccatatcttcatctcttttatacctggtctcattcttggccaaagtaaaatagaagctatcagaagaacaattctacatacttccaccaacaaattaccaacccagctatacccatatactctaccttctcacctgtcactacagatggtcagcttttgcttctatgtatgtgttttaatgtattagtccattttcacactgctgataaagacatacctgagactgggaagagaaagaggttcaatggacccagcagttccacatggctggggaggcctcacaatcatggcggaaggcaatgaggagcaagtcacatcttatgtggatggcagcaggcaaagagagagagcttgtgcggggaaactcccgtttttaaaaccatcagatctcatgagacttattcactattgcaggaatagcacgagaaagacctgcccccataattcaattacttcccactggtttcctcccacaacatggaggaattgtgggagttataattcaaggtgagatttgggtggggacatagtcaaatcatatcaattactttcatggggctgccataactaaatactgcaaactggatggcttagatcaacataaatgtactgtttcccagttctggagggtacaagtctaaaatcaaggtgtcagtagggctatactccctctaaacacgctagggcaggatctgttcaggtcttttttctgttttttggtggcttaggcattaactgtcttgcaaatggccatcttctccctgtgctcatcccatagtcttccctgtatgtgcgtctgtcctggtatccagatttctccttttataaggactctgatcgtattggattaggacttaccccagtgacctccttttaacttgattacatctgtaaagtctgtatttccagataaggtcacattctgtgggactggaggttaagacctcaacattttttgtaagggggaaggtagatgggggacacaattcaacccaaaagcttagactaatttcccatttgtatgctgaatcccattcctttccaccagccaaatggatctttcggcaattgtacctgtttccccctgcattatctatttttccctttctattgatcattcccatcatatagaagcaggatctaataacccccatcataaaagctaaccaaccaatcaaagaaacaaaaaacttgctgatcccacttatcttatttacagaactcaaaagaattgtctttactctatggctctactccttcccctttgctttctctgaagctcacttcaataaggctttaacctaccatgccatcaacatctctttggttatggccaaaagcactctatatattatcaaattcaatgggcagctctcaagtcttgtcttacttgacctgtcaactgtgtcatttgacacagtaggccactccttcctttttgaacccatttcttcacttaatttgaggacagcactctcttttgcttcatctcccatctcactggccattgcttctcagggtttagtctttgaaactcgtctctagatgctccatgccttgagtgatgtcacccagccttgcggctgtataccatccatatctacatacactaacaattcctgacctctttctttaatgccaggcttgtatattatgttaatccttcctctctactcaaatgcctgatagacttctcaatattttatgccctaaactgacctcatgatgatccttcgtgcatatcctagttcttttcttgtcttccctgtctcagaaaatggcaaattcatgatcctagttgcttaagctaaacccttggcatcatccttaattatctgtctctttttctcatgtctcacatacaagtatcaatgaatcctctttgctctacttccccaatacatcccaaattcaggcatctatcaccatcttcatcattgtcaatctggagcaagccttgattcaccttcgcctggactattataatcatcccccagttagtttccctatctctattcttgcccacctctagtccattccggacccagcaaccagaacatgtaactcaaaatccaccaatagcttcccttcttgataagcataaaatgccagctcatttcgttggccttcaaagctccccatgagtgcattcttggccacctctgacagaatcctgtaccacttattcctgtattccctccactccagtcacgcgagcatcctggttccttttttaccctgccaactgtgctttctgcctcatggcctttgcattcactgttcctttaatgaggaatgcccttcttttaggtatccacatggtttgctccctcatttcatccaggtttctgcccaaatgtctccttgtcagagaggactttcctgcccactctagctaaaatagcaatccctgtccaccaatattctccatttccttacccactttctatttcttcataacgcttatcacggctaggaacattttatatttatttgtttttttcccttacctctttaaagtataaacttcaagagagccacgactttgtttactgatgaacacttccttagctcctagcatggtatacagcacatagtaagtgttgagcaaatatttctttgtcagttaatgtgttaactccctgtttctctctccttctttctcttccattttcattctcttccttcctatccatttttactttttctctttctttttcttcacattccacttccatcttcatttttgcttcattttcagtttaatatcagaaaaacagattgattcaaagactttcaaaaggagaaaattcaatgtaatccttaaaattgttatgaaaattgttataaaaatcaaagcagaaccacccataatttggtggttaattttcaaaataaaaagcagctgaaattttagggctaattgcaaaaatgaataactagattaatccatccctgcattgttttaacctgagtttctaagacactgacttttcaaataagctaatataaaagaggggctccaaaaatttacccatacctatgacagaaagtagcttgcctttctgtgtattatttatgctacatggattaaaaattttataataaacttcttagtaaagaaagaaaatatctcatttttcctctacacttttgacttcttcttcttttttttttttttaaaaaaaattcccatctgctttaatgtttttctttggttaatattttgggatttgttcaacaaacttacttcttaataatgcttgattaagccttgtttgcaaaatcaaatatctacagatgtgggcaagaaacacaatcaagtaggctcagggtaaaaaaaaatgtctacagtttaggggcctgtgacaaactggagacacatgctttgtgtaaagggaatactatgaaagtcaaaacaaatatgggtgcagtacaaatttagctggtagttttttgacctctgacttaggtgactattataataatctggtagctgctagtccttatattcctagtagctaactgtgggaggaagtgcatggtatcgaagttacaaaacaaatattagagtagggaaaatcaaacttctatgaaaaataagtcagcaagtgaatacgtaaaattgagtgggtatgtatgtgtatgtgtgtgtgcatcttcaaaataatagtcaattattatgcagtgatgtactgtggctctctggaaacataagaaccacatacaaaatataatgggatgaatcacaaagtcggttgcaggtagacatatgcttgggtacaattatttttagggtattttctgcaaataatggaagttaaaaggagaaatctaatcaaaaccagaatcagcttccagacagccaacccatctcagatgtgagaactttttgttagctggttataccatgccttccactccgtggtgagatgatgaagatgcccctgggtgaactgcaccctggttttcttccgtttcgtatacttcgttcttgctttgtgcatacctgaaatccatgcagactggaacgcactgtgcacagttgtgtggtgactgacgcctgaccgcttcatcatgtgtcttagttcatctgggctgctgtaacaaaacgccttagattaggtcatttgtatataaccaagatttattgcttatagcttaggagtctggggagtccaagatcaaggcaccaacaaatccagtgtccgctgagagcttgttccctgcttcaaagatgccctcacatagtgacgggggcaagggagcccccttgggcttccttccataagggcactaatcccattcatgaggggttatgactcatgactgaatcacttcccaaaagtcccatctattaacactgtcacattgggtattaggctccaacatatgaattttgggggaaaccaacattgagaccacagcgccatggagctgtgctaagtgagagagcggttcctgtatgcgggggttttcgttaatgcagtaccatttaaagtgaggattgcttgtatcagtaaatcaagacagcttgtttttccatacctttgaactcaaacttacctaatgtttgctactttgatgtttgtttgtttgttttcagatactcatttagggacataaatcatcatagttgtaagcccgtgctccagggtcaaaaagaatattgggttcaaagaccaggtctgcctcttattgcctctgtgacctgtgagacgtttcttaacctctctaagcctctgtctcctcatctcaaaaatggagataatcatacctcacagctttgattaatgtgaagattaaagtgagatgctgcttataaaaaacttagccataataggtagcataacaattctcagtatatattatcaatgactccctttgctattactccttttattagtaatacagagcacagctactccttgaagtgtttcataaagtttggtgacactcttaacactcctgagaggtcaagcatacaattggcttaggttggaggaacagtgaacttggtggtcttgttgagccctggtcatgcataactaggatgccagatgcttcgacctgtaataaaaaattccccttgagcttggtagaatttggcaggctcaccgttcatccttacatgagccgtgtgagtcaagcactgggccagctcggcagaggcatcgaagttcaatcacagcgcaaaatctaatcaattctcacagtcaatgaatgaactgatgattcaggtatttatagcaaaaggtgtgaagagattatttggaacatggtggagggtaagaaacaggtataaatctattccagaatttcatttcttgtgagtcttctaggaaatgagatgaatgaacttttaaagaacattcattattcagctgagatttttgagcatctactatgtgccgggcattaggctagcttctagcaaaggagctgagaacaagactatgtgagcaccagctctcacagtgttcaaaatttatgtcaacatctatgctgagtgtgtagcccttattactcagcttggcactttacctttctctaagttgtcagaaactactagaaatttgaacggtttccatcaatgtattcaaatgaattgctttagtggtgggcagaggaaagatcctgttttttcctcccctaacacgcacatcccattaatcaacagattccttgttatttaataataaataaaaatacattaacttgttgaggcaaacatgtttcccaaagccattattaaaactgaattaccaacaacatggtttgaacagtaatatcatgaccacaagtcatttttctcagttgactttctgactggtgatacaaaatccatgggaactgtctgaattgcgaggcaaatattttagtaatgagtcgatccccaaaacaatttcaacactggaatggaaatttatacattccttaagctttgcttcaaagacaggtaaaattccttctgaattgggtaaatggaatgcattctataaactgtacccttttgttacaatgaacccaattgctcccgtcgttcataatctggcccagcaagccaattctttgttccattgctaatccatagtgcagattttaatctccaacaattagtaacccattcctacatatcttggaaagttcatgactgtcagggtaggcaatttttacgttgtgtatataggtctccaaagagacaatacatgtttgtggaatgaatacatgcttttaaaattcccatttcaataagtggagtttgcaggatactttaacatagcccagctgagaaaaattttagtgaaagaggaatctagaatagtagtttccaactgagggtgatatcatcccccaggggacatctgacaatgtttggtgtcatcttcggtagtcacatctgaaagagggtgctattggaatctagtaggtagaggccagggatgctgtgaaatattctacagtgcacaggacagctttcctacgatgaaaaattatctggccctaaatgccactagtgctgaggttaagacaccctgatctggagggaatgcttctctttctttcatctctctcactggggaagtcagctgtgttgtgagtaagctccagcagccctatggagaggtccatgtggtgaggaactaaggctccctgaacagcagtcagcaacttgtctgtcacctaagtgaggcatcttgcaagggcattttccagcctcggttgagctttcagatgaaagcggctcacgcagacacctagatggcaacctcatgagagattcccagccagaactagccagctaagccacacccaaattcctggccctcagaagttgtagaccagtggtccccaacctttttggcaccagggactcgtttcatagaagacaatttttccacaaatggtggggtggtgggggatggttttagaatgaaactgttcacttcagatcatcaggcattagttaggttctcatgaggagcaacaaccgagatccctcacatgtggagttcacaatagggtccacactcccatgagaatctaatgctgccccgatctgacaggaggcggcactcaggtggtgatgctcgcttgcctgcagctcatctcctgccatgtggccggttccttacaggccacagactggtactggtctgtgccctgggggttggtgacccctgttgtatgtgatacattcttctaagtcataaagtcgttagtaatttcttacgtagcagcagaaaactaatataagtaccttacgttgtatctacaccgaatggcttcattttattttcctgtattccggtgagtacaagaagaatggtgaaggatatgctttttgattttgtggagaaatgaagacttgcagaataaagcatcttgcttagttaatagagtcacaagccatttgatggagtacctgttgagagtatagcctaaggaagccttgactttgaagcccaaatctgccactttctagccaagtaacatctctaagcattgatttttaaaatatgggaacaacaggagcacctgtttgatacggttgctatggaaattacaagagataacaatgtaatgtgcttagcacaatgagtggctgatggtaaacgctctacaaatgttcattgaagaaatagttgttatgattacatgagtgagtgagttttttttttttcaactcaaatcactctgtttttctgtttcacatctttgccatttaaaggtttgggaatgagtctcaaagcccatgatttgtgatcttctggcattttgctgaggttgggattagaattatttaagttgcaaggtggcgtttggtggaactcagcgatctcccagctgcctgtgcagctgtctcaccagagccagtgaggcactcattctgggggcaaaatttagcagagtgccaaaaatctcagtactgttagggtaaatatttttatataatattttaaaaatccaattggcaaatgatggctaaccacctgtttttgtaaatgaagttttattggcagttcactactcacagctgtgaattcaataattcacatcacgctttttaagatgattattttcttaaatttatttttcgtttatatttacagtgaaatttttgcccttaagcaatattcatgtgtgcaagcaattgtgaggttaatggcacttatcccctggaatgggtctgtatgaatttggaagctgtggcaacatgttgcagacagcttatcatgaacagttgtggctggaactgataatgtcttctctcattgccaggctcttgatccttcctaattcatatgatttgcatccataattttggaactaaaaatatgtcttttaaacaagtaatatataaagagaaatgttccaaatcctatttatattttaatttattattttttatttccataggtttttggggaacaggtggtatttggttacatgagtaagttctttaatggtgattttggtgtacccatcacccaagccctacttttaattctaaggtgatagagatccaggattaaaaagaaggataaacaaaaagaaaatagaagtaaaaaaaaatagaaatcaaagcatcaactaatgatatggaaaaagaaaagccaaacctttgttctttgaaaaaactaaaaacaggcttttgttgagatacagacagcaaaaaaaaaatcctaagaataaagcaaaaacttctacaattatagatgttttaaaaaatcgtaagtgaatacagttagcaactatgtgccaataggtttataagtctaagtgagattgagaattttctagaaaaaaatgtaaattacttacactgacacagaaagtagaagaaaatctaaataaaccagtaaccatgaaggaactgaagtggtggcaaacatctgcaggcctgtgccagcgctggctccatcggtggggacctgagctgggtagtcacatggcggccccatgcttagaagtaccttgctcagggtttaattctttgctggctttgggtttaattctttgctgctactatcttaaaattctttttctctttctttcttttttttttttttagacaaggtctcactcttcccacaggctagagtccggtgacatgatcacagctcactgtagcctcaaactcctgggctcaagtgtcacagctcactgtagcctcaaactcctgggctcaagtgatcctcctacctcagtctccctagtagttgcgaccacaggtgtgcaccaccacacttggctaattttttttttgaagtttttgtagagatgaagtcttgccatgttgcccagggtggtctggaattcctgggctaaggtgatcctccagcctcagcctcccaaagtgctgagattacaagtgtgagccaccacacctggccttaaaattattagtttgttatattaccatatataaattataatatatgttacattatcaactgttaattatattatgaaaatatagtaacatattattaactaatatattaatatatattatagaattaattatagtatatattaataagaagccctccttttaattttgtgcttggccctgcaaattatgtagccagacctgtacatactggtatacttttataggtgagtttttcaactaattttacagtactgataatctaaaaacttttgaaaataggaaaagaaggcaaattacccagttcagtttagaagatcattgtaacaattccaagatctcttgatgaaagtcattcagaaatttggagataaaatgttatttcattggacctgccaaaatatgaataactgccataatcatttattacctaagaagtttgatattgacccttacagttgagaattgttgtgtcttcaaacgaagttgttttctaattttttgttttttctgtttccagcaaaaagtatgctagaatagcttatcctaaattcattctaggttagttgataagttaactattttaagctcttccggcatttctacactcttaaagtcttaatatgaatttttttccaggtcactcgctagtgaaccttggaaagatttggcaaattgacttaatgtttgtccaaagtcagactcagcttatttttccggaagctctaagttaaaaaaaaaaaaaagatggaattagtgttggaaatcttattaagaatacagtggaagcatacttgttttgttcttttgttctgtttctatatttctgatccagctacgttgtttctctataaggcgggcagatcatttgaggtcaggagttggagaccagcctgggtaacatagcgaaaccccatctctattaaaaatacaaaaattagctgggtgtggtggcaagcacctgtaatcccagctacttgggaggctgaggcaggagaatctcttgtacccgggaggcggaggttgcagtgagccaagatcgtgccactgcactccagcctggctaatagagccagactctgtctcaaaaaaaaaaaaaaaaaaaaaagggggctgccctctgtttcttgccacgagggcctccccaacacaattgcctgcttcatcaaaacagatgactattacaatcctttctcacgtaatcaccaagtgacatctcatcaccttcgacatattctattggttagaatcaagccacaggctccgccacacttaaagggaggaatttacacaaagctttgtttgcctcataaaatatcattcacgtattattttacttagggatcatcttttaaaacttgaacaaattgatttacaagtaaattttgtagtagcaccagaactttagaaataactggtattagcagaagataattgcaaacatacatattaccagcaataaaaattacttgtctgtgtaccttgaaaattcatcctgtgtataacttgtgattatacataagcatccttaataaaatgctgaaaaaaatcaatgtaatacacttaatataatgccaatcacacagtcagcccttaatcaatgtaagttattcttattacagatctattaggttggtgcaaaagcgattgtggtttttgccattacttttgcaccatcctactacaagtttggtctccagaatatattgtatatcggatgaaacacaggctgaacatcccttttccggcacccttggcctattgatcatgatcttctttcctggcatgcttggactcaacttcagaatgtttcttgatactgtgtttcaggcaactgccaccaatcaattggtgttggcacaatccagaggaccgctaccggtctccagtagatttcacctggtgtagagagatctgggccaatcataacagaaaaaaagcattaacaatacataaaatgaagggggaaaattgatctattaaaaagaaaacaaatgcagatgaaaaagcaaagcatttctttttcaagtatgtcatcaactctcaacttcatatttattttgtcttcctgatctcttttctcccacaatatgggacatcctcatcactttacctttctgctcaatgtgtgcaaaatatattgcacacccagttttatgaaagcacaacagattcgggaggagaaagtttcctctgtgcaaatcttctaatcaattctaaagcattggtacttgggagttgatgctacttgagaagctcaggtgcaaggcatcctgatgactaagggttctgcaaatattttattgctgataaaggaggttctagaggacaaaacaatcatggagaagcataagtgatattaatcacttattaggtcaacttccaacccaggagattaggaaaagctcaacaaattaggccaaatcataaaatggcaccttggctttcaaccaacagctttctcctgaatacttgctgatagattcattgactgacccatttaggttctttgagcaccaagaagtgcagggaaatgagcaagaactatgaagtcagacagactggggtttcagtccgagcctgcttgctgcatttccctgagcaagatacttaacttctctaagcctaattgaaaaatgagaagattcccagagatttggcaaggccatgggagaaattgttgggacaggttatagaaaaggactaaaatactcaaaatagattagtggccctaatcagatatttgtgcatttcagctttttagagaaatgcaatgagatgccctaaaaaccaaaggaaaaaaattcatagatttctagaacgtgcaaaatagacgttgaaaatgaggcgtgccaggtgctatcaagagtagaggctgagtcaggactcaatgttggggaccgaagctcaggccctgccccagaaaggattagctccagctgatggctttgtgggctcaggggccacacagaccaggacctctgttttttcacagaagccagaaatatgagatggtgcatctcatcccacaactgttaaatgttagtaaatctttaaatacctgctatttactgagaattcatcatgtaccagacagcttctaagagttttagtgcattgtttccattgattctctcaacaactgtatgaaatatgttttgatcattatttctgtttcataaatgagaaaactcaagcacagagaggtcagaatcacttccccaatgccacacagcagaggagctgggatttaaacccaatctatctgcttccagcactcagttcttttttttttcttgagacagagttttactcttgttgccaggctggagtgcaatggagggatcttggctcactgcaacctctgactcctgggttcaagcaattctcctgcctcagcctcccgagtagctgggattacaggcacacaccaccatgtccagctaatttttttgtatttttagtagagacagggtttcaccatgttggccaggctggtcccgaactctcgacctcaggtgatccacctgctttggcctcccaaattgctgggatttcaggcatgagccactgtgcccggcctgcacccagttcttaaccacctcgatacactgcctatttttcttttcttttctttttttttttgagatggaggcctatttttcttttaaattattttgacataatttcagaaaagttacatgaacagtacaaagaattcccatataccattcacccagattcttcaagcatttgcattttactactttggttttgtccttctttttctctctttctacatacacagacacacagacacacacacacacacacacacacacacacacacacacacacgtcttaactctgaatgctgagcttgcctagaagcagtaacatcccagtagcaacaagcaccaggagccaaaatctcgatttctaaatgttcttttctactgaaacaaattaggacttcttgaagaaacagatgattccacggtggggcaggtaaagtacaagatcagcctggaatattttattgttccagaaagcaggaagtgctcaaaaatggtaacaacatgtcaaaacaaacaaacaaacaaaaaaccagcaacaatgcacaggaacctatttaaagaggctcccattaatcaaatctggggcaatctgaatatcaaaatgaataatgacagtgtaaaaattataacccattcaaaaacataagaatctgcaagctcgcactgacataaatagacataaattataaataattaattcttcctgacagcacgactgtaatctcagcactttgggaggccgatgtgggcagatcacaaggtcgagagatcgagaccatcctggccaacatggtgaaactccctacatagctcaccacaatagcaagtttatatgcatttctgtgattatttgattgacatttcctccccttgttcttccccatcctccgtagtaggatacagatggcgtaagagcagggacatgtttattttggtttgcccctgtacccatgatgcttggcttacagatcttcataggcactcattaaatatttccttttacctggttgtcctagttgtaatgtttacaaccaccatttatggtaaccaataaagctaggcaaatttcccaggactcgtgccaagttgtaaatcctcctctccaaggtcttctagattaccaggtcatacagtgcctgtcacagggtagatgcttagtgactcagggcaattgtgattgtcatcagtaacacacgctgctcagtgctcgtagcttattatgacacctttctggtccctattctgtctccctcaaggctgactccatattttagctttaacaaaatttccagggatatttgtgggaaaccagtacacaataatatatatggaattcagtccagttggcttttgtgatgtccaaataatttttttgagagagaggaagggaaaaataaaaagagagaaaggaaaaaaaaatgaaggaggaaatggagagatcaaaggaattcctcaacgtttgtagcagggattctacagaccaggtactgctcccccggagagtaggaattatttatggggaaattacttacacaggggatggagtgaggttgcattatatgcacacttaacccaggcacatccaaccatccatgcttggagtggaaagatgactatggaaggatgtagcccaggtgattccaacaccctcactcaatgagaacagcaagatgagaaacgagatccacctcttgccttatttctcatgcacatctcaaaatgtgagctcctgatgcccttggtgtggttctagcatctgaggaagtgcatttttcatgtgacatggcccctagacataagccaactactttaggttgttttcacccactagagcagaaagcttttccaacaccggaaggaatcctctgtggattaaaacccatttatgcctagtgttccattagtggaacgctaagcttctgggagttattgaaatcccactgcttaaggtcatcgctaaggtctgatttttcacaaaaaaatttgcaacctctggcataaatgggttaatgagggatgaaactatgtgtttacggtatactttacagataattgaagggatgtaaagtttaccgtaactctaagaaatttttactctggttgactttcaaacctaaatccccagtgcgctttctcgctaatgaaacacctgtgagttccataccccttaaacttcatgctgatatagcaggaaaaatcctagattttattttattttttgatattgaatttcacttttttgcccaggctgaagtgaagtggcatgatctcggctctctgtaacctccgccccccaggttcaagcaattctcctgcctcagcctcccaagtagctgggattataagcacctgccaccatgcccagctaatttttagtacagatggggttttgccatgttggccaggctggtctcgaacccctgacctcaggtgatccatcggcctcggcctcccaaagtgctggaattacaggcatgagccaccgtgcccagccaaaaaacccctagattttaaagttgttaacttcaccaggttttaattctagaggagtcatttcccaactgtgtgacatggggagtttacttaacctctctgagccttagctattcaatggacgttaacatatgcgatgcacaagtgttctcatgaagatcagaaaatttgaaatgtacgtagctcggtgctgagcatagagcagggatggtgtccaaattcttatttcctcaatcagagaggcaaaagtcaaacaactccctttacaggggcagaacctgtcaaaagaaatgtgctgggcccaaatgggaaaaatgagacaattacaccatctgaaaatacaaacacgatcagttttacctacttgtggagcagaacctaagagacttatgggaaattaatttttttttaagtgaaagcaagtttattaggaaagtaaaggaataaagaatagctactccacaggaagaacagtagcatgggctgcttgattgagtagacttgtagttatttcttgatgatatgctaaacaaggggtgggctattcatgagttttccaggaaacaggtgggcaattcccggaactgagggttcctcccccttttagaccatataggggaacttcctgatgttgccatggcatttgtaaactgtcctggcgctggtgggagtgccttttagcatgttaatacaggaaattaatttacttttctgtttagagtcttcttgggactgatggagaatcaccaggacaattacaaaatacagtggactccatcaacccaatggtctaatcatgggaggttttaccctaaatactggaaactacaaatccacagattaaatttgatacatttggtttggttcaaatctagttgccaaatagtgatttttctaatcccatcaattttgtatacttttatttaattaatttattttttgagacagagtcctgctctgtcgccaggctggagtgcagtggcatgatctcggctcactgcaacctccgcctcctgggttcaagcaattctcctgcctcaggagaatctgcctttctcctcccaagtagctgggactacaggcgcgtgccaccacgcccagctaattttttgtatttttagtagagatgagcagtacatgacgtgcatcccacaggtccgggaaccaatctatctttgttggaatcctggcttccctacatactaactgtgattctaaggagattactgagcacctctgtgcctcagtttccccaggtgtgaaatgggaagaatgatcacatctacttacagggcagtgacaaggatttgtgaattcatatgtagcaagtgcacagaggagagactggggcagcaagatcagtcaataaatattattatcatcatgaccacattggccatgtcagtgtcggctccaggcaacctgctcagggaggtgaggggcagcagacgtggcccttgctccaccctgtgctcctcacacccatttgccggtctttgtgcccttcgcccaggtttttcatgctttgctcctcatggctggcacctgcagccttcttcaaagactaccttctggctactatagccattttgcctggacatgtaaagtctagaagtatcttagagtttataccccaaggtgcagcctgaactgaaggagtgtggaagccctgctccctgggcacaaggagaacaaactgagctgcaatgtacactccagagctcccagagatcaggctgaggctggaacttcactcaaaaccacacgcttgtttggcttctttcccttcctcatcctgctgtccccacagtcgcacaggtctccttgggaatcacaaccctaatgaatcccggtgctggggacagcccctgtgggatctaagtcatcaaggaagatttccttcaggaaatgaaagctgggtggacgtagatggtgcgtaggagaagaacaggcagagaaagagcatgccgggagggagacggtgggaagaaccctcttgctagcatttaaggaacagcagaaactggcagaagccactgtggcctggttccagaggcctctgggggtggatgatgtgggctgaggcctgggggatcagtgggacctcagttgatagggcctggaagtgtggattgcagaatcggatctttacgtaagagcaatgggaagccccagaggcaggatgaggcatgatcaggtttgggtttgaaaagaccagtaaggcaagtgtgcaaagaacagaggggaaggaagcaagagaggactgagatcagctgggagctcctgcagagactagagatattagtggtccaggcaagagattgtcagtattgctcccagccacggaaaatttggctgttgtaggtctttcattgtgaaatgtaaacttattcttgggaattaagtattcaaacagtgaatgtggtaggcaggggctgaaatggttcgtaacctctacctgactgccaagtgccagcctccctttcatgtcatgaaagatacaagagagaacaggctcccaggccgttctacccccctttcaatcacacaaccagtgtgtgactgattgtgtgattggaaagggggtagagatagaagtaactggacttgggaaatatttaagcagcaacaaaatggaaagttattttgcaattacaagaataaactttcagtaaaactgctattaaagtctagatttatctaagggtaaattttgtgatatagggcttgtaggccatatgagaaaattttctaccagtaaaataaagtttgaatttgtttttattttgttgtaacaaaggcaataaagaggggaagtctctcaaatatttaaaaacttttatttttactttcagagaatttgaaggtatacagatgaaatctgacaagacgtgaatttataattctaaaaataatttcacagcagagagaaagcatatacctagatatgtacatatttattacaatataaagacataaatgtatatttctgaaatattctaaaaatataatgtaggaagaaatatttatcaaatacacagaattatatacagtatgcatttaggaaaagcagtagtaaaaatatgcacaaataaaccatctgtaaacacaatttttaagtcttataagtattgcatgcatttctgtgcattttacatttatgaaatcatatttttcctaggagttcaaatcacaaaacaaatgttatataacagatctctaacttttgcatgctttacacttgtcccatttaatagacagaaaaattatggcatgggaaatcattttataatattaaagtcacactgaatgtttttaagctgtgactaaactttgaaacattgccctgcaccacagatcctaaatcaagtactgcaaatattaaaaaaatgactgaggcaaattaccattagaacccacacacacatacacggacacacacacacagacacacacacacatgcatgtctgtgcttcatatgcacatacacaatttaaaaattattgcttcatctttaccctaatgccataaaggaatcacatttaaaaaataaacaattttaaggtcctctaacaaaataatgccccagtgaatcactagtcttataagttgtttgacttcgttaaagtccttttaaaaatagaggtgttctctagtttcccaataatgtttttatttcaatgcaggaagaacgcaatttcatgggaggcctgataactttaaccatcatttagcttggcttacattattaagcagggacattttcctaagtagtacattaagcagagctacagtaaatggattgtcagtattactcccagccccagaaaatttagctgttgtaggtcattcattgtgaaatgtaaacttattcttgggaattaaagattcaaacagtgaatgtggtaggcagggcctgaaacggtttgtaacctctacctgactgacaagtgccagcctccctttcatgtcatggaagatgcaagacagaacaggctcccaggccattctaagcacctgaagatggtgctgacacaggtgaagtgtaaaccagcagtgaaccctgtagaatgccttggatcccagcactcagtccgcttccctgagttggatatgatgttagcaaataccaccatctagaaagacagtacagcttctggaacaattttgcagaagaaaaagtatcaacacctgggcctaaatattctttataagctgttgtatggtgtggtgtttgaagtttgctttccggtaacgtagaagccataagcaccattcttgcagaaaagttgaaatggctgttttggtcttggtaaaaaaaaaaaaaaaaaaaaaaaaaaaaaaaaaaaaaaaaaaaaggtataccctaattgtatatcaaagaagtgtatttaaacaagacaaattattagccaaagaaaaaatgctaaaacttaaaaggtgtggcttactgtgataaacatgcatgctctttgctgaaggctggggtgtcacaatgcagctagaatactttccttaccctacttgattcagttctgttggttgggatgctcagaatttgacaaatttcataatagcatcagacacttggtggaggaataataatgtattcatttgggccttgttcagaaatttcatctgtaattgcatgtttctctaaataatctaccaataagcaaatgctccttaacttgccattggcaaacagcatttttttctaggaaaatcctagaaggtgctgctaaaagaacacaatgatagaatccgggtttaaacaccgacatgtcagcctataaagccatatgttacaaatgtcttatttccaccaccaggggtggtggctcacacttgcaatcccagcactttgggaggccgaggcgggtggatcacgaggtcaggagttcaagaccagtctggccaacataatgaaaccccatctctactaaaaatacaaaaaattagctgggtgtggtggtgtgcacctgcctgtaatcccagctactcgggaggctgaggcagaagaatcgcatgaacccaggaggcggaggttgcagtgagctgagattgcaccattgcactccagcccaggtgacagtgtgagacactgtctcaaaaaaaaaaaaaaaaaaaaaaattagggccttcttaggctaacttttgatcacttcaatagttttgaattcattgtaatgtctattaggagaacataactagacttactaactcttaatttcattaaggaaattattactcaggacgaggccaacatatgctatttggcttatgttatttaaaggaaataactcagtagtattgaaataaatagcacctggttggtatatggacatggcaaaagttgtggagggaacatgagaactcctctattgtcagaaaaagtattgaatggcatactgcagaaaaaatattctattgtgttcaatacaggctgataaatatatacatttatattacatgtggttgcataacacaaacctagaccctagggctaaatacagtccaccgcttgttttttataaaatttatcagaacacagcctttgtaggcagaataacagatctcctaaaatgtgaatgccctaatccctggaacacgtgaatatactaccttatatgaaaaaaagggctttccagatgaaattaaatttatgaacttggagatgggagacatgatcctggataatatcttgtcagacagaagcaatgtaagaagaaagagagattcaaagtgtgagagggactcaaccaaccattgttactggctttcagttggggaaggtttcatgagccaaggaatatgggaaatctctcaaagttgaggatcgccttcagctgacagcagcaaaaaaataaagacttcagtcctgtaaccatgaagaactaaattctgccaacaaccaaactagcaagagaatagatcctcctctagaacctccagaaagagccccgacaacacgataattttagcctggaagagcctcatcagacttctgacctatagaactgtaagataatagatgtgtgtcgtgtaactcactaagttttagtaatttgcggtggcagcaatagaaagctaggacatcagctcactcattagtttacaaattgcctgtggctgctttcatgttccaaggtagtattaagaggatgtgacaaagactgtatggtccataaaacctaaaatatttgccaactggccctttacggaaaaagtttgccaacccttactattcacatgcaaaaaccatgaacagctgctagcatttactgaacacttaattgatgccaggctcaggaataactacttggtattcatattaaatttttgtgatacactctctttgggtcatcattttacaaatgaaaaaaaaaaaggaagtagagagtttagggaactgctcaaggtcacccagcaagttagaggtgagctgggattcaaaccccagtctggctgacttcccagcatagctcatccctcgtcattctcactaccttgcagaggataatgaaccgcctagatgctcacctgaggcgtattatcgctggcaaaacgcgatggggagttcccggctgggcaccagggtgcctgagtgtagcatctcaacaggctcattgtctgtggcctggatgtcgtatttgcggacaatctgtaatgcacacgcacacaaaaacagaattacccctctcttcttctgccttgtgaaacagcacagaacataattgcagaaaccggtaaaggttttacccaacaaagagccaaatgcagttgaagctctgctaatcggcgaccaatgcacattctttttccaacgccaaatggaagatgcgcaaaaggattaattttttccttctcctgaagccaacgttcaggtctaaactgacttgaatcttcaaaattgtcttcactggatcccaacacctgggtatttagcatgagcactgtctaaacacatgcagagacacatagtatttaaaataaccagaagagacctttgaatggcaaaattgacacaagttgtcaccttacaaatcaaaagccaaatccacaaatttataataatgatggttgccaacatgcgctgagtgcttaaaatgtgccaggtaataaataggtaaagggctttagaattgtgcaccatactcacaaccaccctgcgcagcagattctgttattaaaccccttttacagacgaagttgaggctcacagagattatgtaactcactcaagacaacacagataaaagatgaaactgaatgcaggtctctgtctccatagccgtgaattctaattctatactatgcaacatgtcaactattctctaccatctctgcattcccaaaatgaatattttccagtacaaagtctagggagatctggtgaatatttgcaaagtgtatcttccaaggttttgtaaggtatagaatatacaaattctacttactcctttgggtaaagcatattcacccagaactgttgccttgtcaagagtccgagttgtaaatggtacactcggcgtaagcctgaaaagataaaatcaaagatgtaaaggtgagcacagtctaagttctctctgaagtgtcaatgggaatgcagattggattaaataaatgctgcccaagtgcatactcaaagaggcagcatgatcacagatcttcctaaagaagttgtttttttcttctcaataattgtatctcttgttcctctcatcttcttgagttagttaaaaccccagtgcaaggctgtttagtaaactgttaacgttggttttcccccttcattccagactaaaatgtgtatgtttccgtgctagcccttgaagcgtgatgtttgttctatgtttctccaatctactcttcacaaagttgacagtatccttctaatcctaaaatgttgtgagttttgttttcccaaaaggatgtaaaaagaatttccaaaaaatgttttataccagaggctcaaaagcaaagctttctctgtgtcctattatataataatatagctcttttgtgagcctccatctcataaccttcaatcatgcccctatcttaattagtgcttacagcgttcattagagtagcaagattattgaattaaaggggagggcactggctttccaagatttaatagaatttgcccaaatgatttaggaaatgagtgccagaaaagaaatatggctccaaagatttttttgcagtgtgataattgtttctaattagctaggggaagccgcccatgagtaggggaccacttgttttgtgtttacgagaacagtgttctaacacatttatattggctcagagataggctcttacctcatagattctttcagacaggcttttaaatacggcatattcctcaaatcttctgcccgtggcacctgattctcaggtaatacactttgaatttccttaagaagcttttgttgcacttggggattacgggataaattgtagagaatccacattagactgtttgctgtctgcaagccaaatggacataaacttgagtttttgtaaataactgcattaaaccactattagctgaaaaaaaggtgatgcccaccaccttattctgcaaatgtatcagtgaagctctttcacgcgtccttatagctacgcctttagacaaatccaatatataaaaaagcagacttatttcataaaacatatcaattaaggatatattttaaattatttactgagggaatcaaagtataatcctttaatcagctgctttagaacatttaaatacagtttttttttttttttgagatggagtctcactctgtcacccagactggagtgcagtggcactatctcggctcactgcaacctccacctcctgggttcaagcgattctcctgcctcagcctcctgagtagctgggactacaggcatccaccaccatgcctggctaatttttgtatttttagtagagatggggtttcaccatgttggctaggctggtcttagactcttgacctcaggtgatctgcctgcctccaaaagtgctgggattacaggcatgagccaactgtgcctgacctaaaatacagtttgacgcaataattgttcgaacacaaatgagtacatgtaaaattggtgaaatgagaatattagtgggttaaatcaatgccaattttcagattgtgacaacgttttctcgttagacaggacattactattagtggaaaactgggtaacggatgcaagggatccctttctattttttcttagaactgaatgtgaatctacaatgatctcaaaataaacatttaattaaaagttgcttgatataaaaaacattcatataaaaatggagtaaacagagagggatggtgatcctcagggtgttgctaatgagaggctttaagagaatgttatagtggaaatggacaataaatggcatttctgaaatttaaaagttcctttggccacaccctaaaaagtcaccacaaaaataaacaggcactacctacactgagggttacaaccacatgtaaacagccctcatacgagggtgccaacaccaaaaataagaaattcaaacattgagctgagtactccagctacagtttctgacaaaggcccacacccttttaagtggcatcttttatttcctctgcacaggcaatgactagagaaaaaatattggtggaaacagccaatgtagctttaagctacataatattcaccactagtagtcatatgtatttattttttaggccgtactttgctaatttaagccaaatatttcctgaaaatgatcattgtgtccacctccgcagacatgaagacgctgttgctaagtgccatgtgccactcacacaaatgagcaccaagtgcaagaccattcagagatgatggttattttattatttttggaagaagatgcctccaaggcagtcttcttcatgtcagaggactggcagcctcggctgcaaataaactgtagatgccattattataagagtctaatttacaaaacaggaagagggtgtagccatcaaattagatacactttcaaatggttctgattttccaaatgtgactttcagaatagccaggaccaaaaaagaaacagatttaaccatatcagtgagtccctcaccgcaagtaccaaatagagtttccaaagggcagatgactgtagcttttaccaaagccacgtaaggcagtctgagcctgtagggaaaactgcaggggctaagctgcagcagctgatttgaggggaagtggcctggaaaacctcaggggcacaaactatccttgattgacctccatggaacagaccaagctcattgactggcctgctgtacccactctcttggctaagtctattctccatccaccagccagagcccacttttaaaaacataaatgatcaggtgattcccttgcttaaaatgctgcaagagcttcccatcacaggtgcaatcaaatctaatgccttacccaggctgggctcacaaggctctggctaacatggcccatccaattctccagtctcagctctgaccacatttactagttctgtagctccatccctctttctgccccagggcctttgcatgggccgtttcctctacctgcagcgctcttccacgaggtctttctgtggctggctcttctcattattccagagtcagctccagtactgctttctcagagagggcttccctttaatcatctccatctctctatattacaccatcctgatggcgtcctccacaatccacaccactatctaaagtgaccacatttgtttgtttacatggctactgtctgtcttccccacttgcatacaagttccatgagagtgggaacccttgtctctggttcatggtggtctctcaagaacctggaacagtcccaggcatacagtaggcactcaatagttcctgaattccttcatttattcaacaagtatctatcagccgctactagatgccaagtactgttctatgtcctggaaacacagcagtggacaactctaagccattgccctcagagaggtcacgttccagttgaaaaaataaaagaataatgggtgacactgtactttgatcactggaaggagccacccagggtaagcagttcaacaggaaagtgagcgaggatggattcccactttcaaccgccttgtggagcaggaggagaaatgagaacctcgctatctcctgatagagaaaaccctacctttacttcaggcaagaaacagcacagaaggggaagcacatggaaaataaacaactgctttacattttgcttagagactttaaggtgcatgaaatgttggacttaggaggaggttagcgtgcgccactcccatcacagctcgaactagtatccaagtcaattaaacctacctgaatgcctatggcaggatttgtttggggttggtctcacttagtatctgctatctcctagggagtatcggccacatcagagacagaattttggtctttacaatgagctgttttgcttcagttaaaatccacttgtcccagactctttgggactttgtttacaattctaagcagataaaaatattattggcttgaaagagagtatgccttttttttttttttttttttttttttttttttttacagtaagtaacagccacagttaggcactttggggtaacatgtgcaactgaacaaaatacttccaattttgaaaaatctggattctgtatcttgccagggcagagaactttactgctcctgaactcccgtagcagtttgcatggacatcatggcactcatcacatcctactctggctttttgtcactggggcacatgaagtctcctcctacccagagtttaagcacagaagcccgtgcatggaggcaccgtggcgtctggtatgaggccgtgcgctgaggcaccgtggcatagatgctgtgcgcggaggcaccgtggcatctagtatgagacttttcatttttgtggagttgatgctagtgaatcccagtgaaatgaatgagatgaattactatttaaaatctgtcatctaaaaatggtacagaccgttcatttagcaaactcaaatccagcccacccttaccgtttccaccgcagccagctggagctctgtgacagcagcatacaattctttctttgaaagccgattctggtgataaatgtcacaaaggaaatctgcactaggctgctgagaatacttctctaaccggttgtcgatacaagctttgactattagagcagagaagaaagagaggaagtcagctgaaaattgggatgaggaaaatcacagaagaaaacctcagtccaaactccttcttgcaatatctaaatagtcttttcaggaacactgacaatttgctacacacactaattatattattgccttcttgtcaagtcggcaaggatttttcaataccgacatgagcaaggcttctcaaactttaatgtggataggagtcacctaggcatcttctcaaaatgcagaatctgaatcagggcttgggtaggcctggaactctgcattcctaataagcttctaggtgatgctgatgccactgggctgcaggtcatagttttgagtagtaagagtttagatcttgggagaaaaaagtgtaaaagaaggtaggatttgggttcactttcagaatccaacttggacccagatattactaagcacacataccccacatacatacgcacaagtagagtgtccatccatgttgacaataatggtaaaaatttctaatatttataacataaaatctaggcgtgtacctccctcactattaagcaaacaaccaccaggctcattatatggtaataatcatgctgatcacatatggcacagcagttagagttcgagtcctggaagctccttgtctggcttcaaaccttggctttgccatcacctagcatgcaatcttgggaacgttggctaacttctatgtgtctcaggtacccctctcagggctaataaaaggacctaccttataggtgtgttgtgaggattaactaaatgtgtaagtgaacaatgcctagcatcaaatattccccttcgtcatgtggcagaaatagatctagtccacggagatactgtgatatgccaggtttttatgttaactgtaatctgtagtagacccagaaacagttacattgaggtaggttctcttattattattattaattattagtccattttagagacaaggcaactgaggatgaaaaggtgattgcacatttggccaagccaccacaaccagtgacagagctgaacttgaactcaggagtccctgactctataaattttacttttttattttgagatggagtctcactctgcctcccaagatggagtgcagtggctcagtcttggctcactgcaacctccgcctcccaggttcaagcaattctcctgcctcagcctcctgagtagctgggattacaggtgcccaccaccacgcccagctaatttttgtatttgtagtagagactgggtttcaccgtgttgaccgggctgatctcaaactcctggcctcaagtgatctgctcgcctgggccacccaaagtgctgggattacaggggtgagccactgcacctggccagattttacttttaaccactcttaattcccaaagaagactacagaaagcttgttacttagaatttgtgtatgctggggcaatccccaaaacacctgtgtttgcaaaacctaaatgtggtgatgaggctcaggagatcactccagacctcctctctgaagctccagacacgggggtgctgggctggttctggctggttgtgaagggcggccctttacctgatttgaaaatggtgtcccaggccagagtgtggtcctgccagaccttggtgttgaggctcttgtgcagctcgactggagtgaccatcatcctcccaaacgtgctcatcatctgagagaaatgcaaatgcctttttattctgaattctccttctctcaaagacaatgttcgttctggaagaggaacattctaaaccgcagcaccctgcactttttaaaaggctggaattacaaggacacccccggctctctctgcaccggtcctgggagcaatgcccgtaccccacctccacctcctttcaatattgaaggtaatgtgggggatgattttccactggatgtgtttgataaaaattgtaatcttatgacctaattgtaaaaaaaaaaaaaaaaagaggaaaaacgataactttcatattcacttcaatttctaataatttccaaacttcagtgatttccaaaccaatttcacagcgtttatcctatctacacgccacccaaactattcaaaaagataaaatctgaaaaattttgggctctttttaaaaagtatttttaatcaactgatctttaattaaaatagctattttaaccttgcctaaacaaagaaataatggatttaatgtgcttctttatgttacgtgcatatatccaggggtccccaacccccaggccgtgaaccagtactggtcagtggcctgttaggaacggggccgcgcagcaggaggtgatcagcgggccagcaggtgttaccacctgagctctgcctcctctcagatcaatggctgcattagattcttacaggagtgtgaaccctattgtgaattgcctatgcgaggaatctatgttccacactccttatgagaatctaatgcctgatgatctgtcactgtctcccatcacccccagatgggactttcgtgttgcacgaaaacaagctcagggctcccactgattctacattatggtgagtatataataataacagaaataaagtgcacagtaaacgtaatgcacttaaatgatcctccctcccctgccccaccaccctgccctgtccatggaaaaattgtcttccacgaaactggtccctggtgccaaaaaggttggagacagccgcatatatgcacataaatatactaaaatatataatgcacattaaaatgaacacttaactattgaaataaaatatgtgtgtatgccattttttgggaatcactgtgaagttctgtaaaaatcgatctgtaaaacatcaatcaagaaaactgctttcttaaagaggctgcttactgttttgatggccatgatgaagttcacagcttcatcccctgcattcttctggagaagcccaaatctcttctcatacaacacgaggcagatacctgtcatttaaaataatcatcactttacacaaacagcaatgctggagttggagtctatgtttagctggttattaaagactcaattctatgcctcttaaaagtgtgggattttctgagaaaaggcaacagtccaagaatattgaggaaaagcagagtctgagagaaaggggacaccatcactttctttttctagaaattatctccaggtccaatgactcatcacctcagagtgtcatgatcagagatccactgtcctgatcaagtcacacaggagatccaggggccctagcaaaggtgctgcagggtcgggtctgcactctgcctctaacccagctgtgtttttagagtcacttattggattctatctcctgacataatgaattggaagccattcaccagaggaagagaagggaagggaataattatgttctaaacacccattacacgccaggtactgggctagcacttcatatagggttttttttccttccatttcatcattttatttagaaggaacctttttacaaataaaattctcaactcttcatttcaaaactttttacctagagaaaagttgaaggaatggtaaaatgaatacctgaatcccccgaactcatcaacatcttgctgccatttctttctctttgtgtgtatgtatgcatacaagtgtatacgtggttgtgtgtgctgaagcatctgaaaataattttgagctctcaggtcacttcaccgttaaatactttagcagtaatgtcctaagaataaagcattctccaacataaccacaatgtcattaacatccctaagaaccttagcgaccattccataaaaaatctactgtgtcccattttaaaatgttccccattgtcctaaaaattatctcttgtaaccttttttttttaaaaaaaggacacagggccgagcgtggtggttcacacctgtaatcccaacacttcaggaggctcgggcaggcagactgcttgagcccaggagttcgagaatagcctgggcaacatggcaaaacgctgtctctacaaaaaaataaaaataaaaaaattattcaggcatggctacatgtgcctgtagttccagctactctggaggctgaggtgggaagatctcttgggcccaggaggccgaggttgcagtgggccgagatcataccactggccactgcaccctagcctgagtgacacagtctggaaaaaaaaaattatacaggattactgcaaccaactttttagtggtggataattggctcttgacttataaagtaggagactagcattaaaaaggtaaacaaatggcctaaaatcataaacctgaggagtgagagtcaattagcttagtcagcacccacccacagcttttccaactacctccatgttttccaaactctacttatttcttcccagcctttcaaggtttccccgtatttgtgttccacagtggttggcaggtacaccactgggaatatgtgagatagctctggatggtacatgaactttaaaaataattagttactctgctgggcacaatggctcatgcttgtaatcccagcactctcagaggtggaggtgggagcatcatctgaggtcaggagtttgagaccaaccggtggcaaaaccccatctctacttaaaaaacacaaaagttagtcaggcgtggtatcgcacgcctgcaataccagcactttgggaggctgaggtaagtggatcacctgaggtcagcagttcgagaccagcctgggcaacatggtgaaaccccatctgtactaaaaaacacaaaaatcagccaggcatggtggtgtgcacctgtagtcccagctgctcaggatgctgaggcaggagaatcgcttgaacccaggaggtggaggttgcagtgagccgagatcacgccgctgcactccagcctggggcagagtgagagtctgtctcaaataagtaattaaaaaaagttacttatatttatctatttatggcaatatttctgaccttgaatttatggaagtgttataggttttccttctatccctcccatcagcagccacagtgatcctcccagtaaatctgcccatatatcacactgctgctgaatacattcccgcagctcccggttacttacaggctaaaattcaaactcccgctcatacagccctccatgagctggctgctggccctctgccagcctctgttacaggatatgcttgtcattccgcacttcttctgcagggacactctccttcctcccttttcacctggtgaactcctactcaaccatcaggacttagctgaggggcaccatctctgtgaagcgacccctggccatgtccggcttaggtggccctctcagattctcccacagccctgaatgtcctcagccaggcgctgtcccacctgatcacagctgcctgctctcctcttgcacccccatgggcagtgagctctgccctttatttccagagtaatctttgaagaaagcggtcatgtcctccctcccttacttgccccatctgagtcagatgagaggtaaagtcttgccaggacctatgagctgtgccctgttggacacctgccttctttttgacctcatctcctttcacaggctccccttcctcccagcttgttcatcgtgatccactcacaccagcagcttgaagttcctcaaactcggcgctcatgcttccacctcctggcatttgcactttcttctctgctgcctggaacaatcctccacaggtaccctcatgatttgctccttcccttcctttaggacttacctcaaatgtcttcttactaaaaaagacttgcccctctttcattctttcatgttatttctttctctctctctcttttcttctttatttcttttcttttttctttcctttctctttttcttttccttccctccttccttccttccttctctccctccttccttccttccctccctcccttctgccttccctccctccctccctccctccttccttccttccctccctccctcccttcttccttccttccttccttccttccttccttccttccttccttcctttctctgtctctctctctttcttgagacggggtctcacactgtcacccagactgcaatgcagtggtacaatcacggctcactttagcttcagcgtcccggggtcaagcaatcctcccacctcagcctcccaagtagatgggactacaggcatgtgccaccaaccctgactaatttttgtattttttgtagagacaaggttttgctgtgttgcccaagctgttctcagattcctgggctggcctcaagcgatctgcccacctcagcctcccaaagtcctgggattataggcatgtgccaccatgcctgcctttcatgttctttcttaactccctttctcttttcctttactccttggaagagtatattttaaaatgtgtttacttgttgactgtcaccttgtctagcatataagctccccaagggtacaggggttatgcgtttcattcattgtcatatccctagtacctagcacagtgccagacacacagcaagtattcaacaaatgtttgttgtatgactcattaacaatccatagttcaaggcataacttaagcacctaaaagaagcattaaaagggctgctctggcctttccctaggcagcaataatgcctgtttacaaaagagttgtcaaaagagccatgttttatccgcaaaatcacctgcaaaatcagtgagcaagtctgtgacgacaacttactttcaaacgaccatttgttcagttcgctgtacaagtcttcaacgtggcctctttcatcacagagctcatctattctgcccataaaatcggccaagaccttcaaagaaaacaaccgcaaaagacacattttaaagccgttgaaggaaaacaaaactttaaagctcactgagctaacttcaggtcttgctacatcgcatattcactggccataatgttattcatcctgaagtcacactaattatatattctccctgggaacccaccttatcccctaatgacctcgtcctgggttatttcctgagcttttcctgaagccaccctgaagcttaagtttcagcttttgatctaaaaataattctggcaatttaagaaaaggaaaacattttttttttctaatcagaatgggggaataaaaccacaaaggaatcagctaactgtccctgttggcccagcatctcaaggattgtgttgcagcagctatcctgaggtgtgcccttccacatctgggcaagcaaacgtctctttattggttggtggttatgttaagcatgttgaacttggaaccagaagatctaccaattctggacacagctccttccctaagtagtctatgaccttgggatagtcacataagacctttggatgccagtttcataaaccagagttttcaataactaatgcctcacatttaatgaggtccatatggtaccaaacactgtacgaagtgtattggttgatcctctgacaaccaagtagtagtaggtaccgtctctactcatttcccatgtagtagatgagaaagctgaggcttaaagaggccaagtcactcacttatgcacacagagctgataagttgccatcctggaccctgccgtgagctggtgtggccatacagcccacatgtgtggatttagtttgcaagtttaatttgcccgcatagcgcatttaaaagttctttgaatttgttaccattaaaaaaaacaagaggtttcatatgaacatatggatttaccactactagtttaaaaatgtaaataataattatgagacttggtgacatgaggtctgcattctgacatggcattcgtttgctggaactggggctgctgtccctcctgggaggggcatgcactatcacgtttcctgaaatttttactgggtctgccttattattttatattagtcatgtgagccctggaagcttctgagtttgcaatccttcacctatatgatcccatctggggacgcatccagttcaaaataaacatccaaagtgaacagaagtaaaaagagattactttatgcttaaaactccctttgactccgtgctggctaagggataatgtccaaataccttagtataatacaaaaatattgttaagacctatccagtatcatttcagagaaagcctcacatcagctacactaaatgaccgattctctgaacacaccacgtcatttcatgcctccctgttttcagaaggctactctgtctgccttaatgccttcccccactttctctgctttcagactcctcctgcaaaacccagctcaaatatcactacttaagaactttacaatgttatctcatttaattctcacagcaaacccgtggggtgggaactgttactcccattttgtagatggggaaactgaggcttagggaaggtaagtggtatatagccaggtctcatagccagggagtggaaagctggggttcaaatccagggctgtagaataccaaagtccacactctccattgctccctcattgtgatatgactttaaaagagggtggaggagggagaaataagggtttggtggggaggaggctgtaggaaggaatggagagaaagagaagacccccactttgaatcacccgaattgcattcttttttcctttgttctttgtagctgtgacttgaagctccaccaatatccctatgtccccacgagccccaggaaagctggccccagcctgcagacctcattgattttgttgtccagcttcatcacttcccctggtttcattagtttcttttgaaaggcactccggacccgctgccagtcttccccttccctgtgagagaagcaggaatacatttagagcacactgaaaagaaaagaaggagatgcagaaatactccagctgcaacttcaggaaccataaaatcaaacaaacactgagaatcatgccaagaaatagccagagaatattagcatcagaatatttgggataaaatagtgatcatcttttgacaatagtttgacaataggatgaaaaagcacctttcctcctagtcaaagattgcaccaaaaagttgaagtccagataatttgggttcagggattttgaggtgtccttgcagggagtggggctgggaggcctggggacaattcctagcggtaaaagggggcatgtgaacaccccatcaccagcaactcagatctgtttgagggaagaatcttgtcttctttcaactcattggtgtgggcttcatatttacaaaatatctcagatttagaattttgccatcgcctccaaataataacatacagtcagagagtcactggagtaataaaaagccttttgcgatcgtgcacttgtaggcacctgccccatagcagaccatacagcctgtgaagcaccgtgaattaatagggtttttaattccagtcattatatcctggaaaatataacgattaggcattacagtttgggggtaaataaaggtgctaacttgttaaatgctaacaactaaaaagcagaagaatcacatcccatagtagcatttgtcgacctaaaacacaactttgatatccctccttattccacctttacaagtagaaataaggcatgtcccccaatcctctgcagaaaatgtcactgtaaaaagccaaagaggctaactcctcgcttttgagcttacaaggtgtttcagggagttttaagggataattttgtttgtataagatgtttgcctggtacgctgacttcagaacctcatcctgcccaagagtctgaacaccacagttggtacaaccctgttttggcgtttctttgatgggagggtgtggccctgccctgttgccagagagaacgcaggtgctgggtgcacagcacggcttttccgtggaccgactctaatctgtacaagagctcagggttgcgatggcacgggagaggggctttggtatccgccctacgtaagaagcttccaaccccagggaactctaactccgcctcttcacaatttccaggcgccgtcaggctcatcaggtctggccgcatgcccaggtccctcggattggactcacaggatcagcagcccgtagccttctttgcggtagtcgcgataggccttccacggtttgatctccagccgctgcgggtacgcgctctcggtgcggtacagcgcttccagcaggcatggcgagcccaggtgcaccgactcaaaggaacccaacttcatgcggaaaatcttgccatacttcttgtggtactccacctgcagccggccgggcacagcgcggtgtcagcgcgcatcctccgccgtgcccgaagcgctttccctcctcccgcctccttcctcctaggggaccggggaccctccctgcccagacgccgaagcgcaccatgcgcccgaggcgcgcatgtcggggagggtttggagcgccactgggagggcggaagagggaggagagagtcaggggcgcgaaaaggggtttaccagggtgtcgtgctgtttcttgagaccccctttccagagaatctgcagcaggctgcccagcagtggccagctggtggggcccggcagggcggccgcgttctgagtctcgccaccagctgtcagcgggcagactggcacctctcgcggctgaggggacgtgtacgccgtagatgtcaccagtctcgggggctgcctcggactgcgcagctgctgcaggaaggcggcaagcgagcggctcttgctgatgggggagctcatggcagcgggggacaccggagcgcgggaaggcaggaggatggggtggggcgaggttggtacgaggtgctagtgggagtcggggcttaacgattctgggaaaaggaagcaaagagggccagctggtgtgatggagcggggtgaggcgggacaggcagcagaaaggacctcggcgaggatgctcgacgctgcaccacgcgacagcctcagagcattggtgcctccttgcactggccgcaggggctggaagagggtggccggtgtctggggacctcttgaaaagggaaagctgggagtcctcctgttggtccgcaaggctgacctctagggtctggctggagccacggggaggtgtcaaggagggtagatgagatgctgctggcgctgcgtttcctcctgtccctctccatgttcctatgcccagggaccatgcatttatggagacagagcatgccctgggtggccaatgagcacgcagaggagggcggagtggcccccggctggccagactccgagggacgcgggacccaggggagggggggtggaaggaggatggagtcagcgaggtgagcgagggcgtccgggcctggggtgaccggggctatgttcgctgggcgcgggaggtggggtgggggcggcagactccaccccggagataacccccaggaagtcatgcgaagcccggagttcaccgggtgtgcttcgaacgcgcctccccgccctcccccggcgggcaggagccggcagcggcggccgtggttgccgcccggcgcttgcacaatcgcgatgccgggcgggcgaggtccccgagtgcgggcccagaaaagctgccggcgtctgccagggccccggggagcccgggcgcctcccggggagccagatacccccagcctggactgaagtgattttttttttttttttgcctttttttttttggaggaagtttggctttctgcgcctcccagggtggggaggatttgagtcttactgaaatgcaccagaagaggagactttcttaacttgagcaagaaggggagtttgtagaatttccttcctgctgtttcatgtttggttgttttgcagattaaatgaattaatgcacgtaaagcggcaacaacgaagccttgtctatagtcaacagtcaataaaagttagttgctgttgttacttctttaggaagttaggaaatgcgccttgagagcgtggcttgcaccaacgatgcttgaattcaggctgggccacctcccctatgtccactgcccgcctctgttcttctacaccgactaccttgtgcaaaggaggggcacacagagcttgaaaccaccgcccccagtactccccctctcccccaaggtgcgtcctaggcaggtccagtgacaaacatacacaatttctagagttaccgcggctggcaagagtagaactcgctttgctaattcaggaacggaagttggagatttttgttgattgttttaaagtggctcgaatcctttcaacctgatccaatacaaaactaccaccagccagggaggaggggagggacattctgtttcctcgccctgcttttcaattacgtgtctcagtcatttttgccccaagtgttggcaaatccttccctggtaaattcttttgtaagcctctagtttgtttcttaaaaatcttttgcagtccaactta

SEQ ID NO: 64 - DNA, 157230 bp, Homo sapiens
gcttttgagaaggcctcagacagagtaatcgacttctcttcatgcctcacttgtcagaactggatctcaccactcccattcgcaaaccagtccctgcaaagggtagtaggattgctgtaattggcttaggtcaggagtcaacaaactttttctggaaagatccagatagcaaatattttaggctttgtgggccaaatggtctctgtttcacactacaattctgccattgtagtgtgaaagcagtcaaaggcaaagtttaaatggatgtggctgtgtttcaataaaactttatttaaaaaaatacaggtggtgacataacaactaaactctaagagtctggacagaagccagacaaagaaagctgtggaaagaacattgaacttggagtcagccccgctcacctggtctgaactcttggctttgccttgtgtcctcaagtaacctacttctctctgaacctcagattcttcagctgcaaaatggggataataatattcacctactaaggttcttgtgggggaagtaggcaatggaagtgagtgtaaggagggaagagtagaaggagtccaacaataatctgagttttctgagctcaagaatgtcaatacaggcagggcacagtggctgacgcctgtaatcccaaccgaggcgggcagatcacctgaggtcaagagttcaagaccagcctggccaacatgatgaaaccctgtctctactaaaaatacaaaaattagccaggagtggtggcacacgcctgtaatcccagctactcaggaggctgaggcaggagaattgcttgaacccgggaggcggaggtttcagtgagcctagatcgcgccactgcactccagcctgtgcgacagagcgagactccatctaaaaaaaaaccaaaaaacaaaaaaaataaaaataaaaaaaaaagaagttcagtgataggtttcagattccacactgcaaccaactttgagcaactatcacttgccaggttttggtggtggtgtagaaactacctgcaattacccaaaaaggctgttcaaatacttctcccttttccagctacagacctgcaagaggctggagttgctttgtgtgcttcaaccaaaacaacatatggcaacagactgaatgcagaagcagatacaagaatccagctgtcttctattaaggcagacagtaaagagacttgcaaaaatgtaaaactaccattatttttgccctgttgtgttttggaacaaaacaaatagtttcgttgaaaaatttttagaaaaaaatcatttttcataaaaatgttatttatgttaaaatggaagggatttatttctttgagatgaaattatataaatttttaaaattcttagttttaatttttaatgtggtaaataggtatcgctcaatccacataaaaattctttgagatcttacataatttttaacagtgcaaagtgttctgagaaccagactttgaaaactgctttttattttttcattacaaatttattataaaacacacagaggataaaatttaaaataataatctataatcctgtcactaagaaatatcctcttttggtatttctttccttccgtatcaatatcatacctatattactcattgtgaaatactgtttcgaaagccggaattttttttttccatcatagatgtcacaaataaatttaaaataggggttgaggggtttaagtacctgagatgaattaactccctggccatattgggtatttaagtgtttgacaccttctgctattataaacatgacagatttcctagacttctcccttagaagcattttccagatgttaaagtattggatcaaacggtagtcacattttagaggcatttgatacatgtcgccaaattcctgttcaactggatggtcttccgtgaggccaggctgggtctccataactcagaattacatttggcacttccatggatgggtgaatggatggatgaatggatgaacaaacgtgtgaaagggatggtttctttgtacccacgttaaaattgggtgttaacagttaaattattttgtatttgcttaattttaaaaaggtgtctcattaggattgctgttgtaattttcatttccttcatgactgtgacattaaaagtgttgtctcatgttgactgaacatttgtctttatctcttgtcaaatgccaaagccattgattcttgacacccagttcctttcatcttctagcactcagcctccttgcagatcagttttccccattccaccaagtcagagataaaaggaaggggctgggggcaagagctttgtgatgagtcttctgtgatgttgctagagggaagtgtgttttttccaagtgaggattaattgccaacttttctttttttttttttttaagacagggtctcactctgtcacccaggctggagttcagtggcaacatcatggctcactgcagtctggacctcctgagctcaagccatcctcccactccaaccttccaggtagctgggactgcaggtgcacgccactacacctggattttttttttttttttcattttttgtagagatggcatccccctatgttgcccaggctggtctcgaactcctgggctctagtgattctcccacctatgcctcccaaagtgctgggattacaggcatgagccaccatacctggccaattgccaacgtttaataatcaggaaactttatataaaaatttaaagatctagtctctcatttgtcaattaaaaggtttggcaatattgtcacatcacagtcgcctgggtctaggcgttggcagccttttcaaagggacacttgtttcttagtttatgttggtttccgtcactccctccccgctggccccacatccattgcctatttatcctcaccctcgtgctgccatttttcttggagcaaatttataagaaccatgaactatttctaccaaaatatgaaaaaagaacactataagagatcccatgtcttcataagaatgcaaaagcatccttgtaaatgaaaagttacatatatttcacagaagtttgatgtatttaatataacataattataatatttaatataaacgtagttgcatatgcttaaaatacaaagtatgtctgtgttgaaaacaagtataattttttcatccaatacatactatgctcttagctggagagtttatgccctgatatttatcacatagcataggaagacccccatctctacaaatattgaaaaaaaaatttagccaggcatggtgctgcgtgcctatggttccagctactcgggaggctgaggctgggggtttgcatgaacccaggagctcgaggctgcagtgagccatgattgcaccattgcactccagcctaggcaacaaagcaagactctgtttaaaaaatatatatagatgattaattcccactttgaacaaacatacttcctgagtcttcctgacccctgcagacacttgagtttgtgagccctgacctggctgctaagcggtgtccgttggttttcctgttgcgcccggggtagaagtttgaagctgagcttcaagtgtttgtctttcccttgggagaaggagattttctagctcacctcacatagtgtgtagacatctgggttatcctcgcttctctagagaactatagctgagaaaatgagaagccatctctgaggagtaataacacacagtgctctgagaggttgaaacagaaactgaggaaaaaaaaccaagtttttcaaaggtggatttaaacatgatcagttttgccatatctgtgttttctctctcctactgcagggcttcccaaactttagttatacactgaagctttttttctcattcctcatgccatataaacgaaaacatattttctttaaattgactcacgatttcatttgaagtatctaaaatagacactgactatgactaccataagtggaaaattagtattatgtcccccaaataaaatgtaacattaaaaaataaacctgtaacaactgtaaagaaaggtcttacgttctagctagattctgttgcctgcctaagatccacacccaaggccagctcactctgttaaaaatatgttaaaggaattctagcatcgccgggcgcggtggctcatgcctgtaatcccagcgctttgggaggccgaggcaggcagatcatgaggtcaggagttcgagaccagcctggccaacatggtgaaaccccatgtctactaaagatacaaaaaattagccgggcgtggtagcacacgcctgtaattccagctacttgggagactgaggcaggagaatcagttgaatccgggaggtggaggttgcggtgagctgagatcgcaccattgcgctccagcttgggggataggggcaagactccatctcaaaaaaaaaaaaaaaaaaaaaaaaaaaacaacaccagaaagaaattctggcatcaaactaaggctttctctttgatacatccagaagcattagttgataattgaaagaaaatggcaaagggaataactacctcaccttctcagttggtgactgaatagtattttaagttcactttatgcccagtgcaaacttttgtatcaccactggtaagcatttcataacttgtgaaacactatctgactgttattcatttattaattgaaaagaaaatatttttattactacttgtgttactccaccaaccagctactataccagcctctcactgattgaacaattaccacaccatgctatttttcttgttccctgacacaagtttttgaaccattcttgtatactatttttcaataattcctagttccccttttacagatgatgaaaataagacttagtgaagttaagaaacttagccaagcttcacacccagtaaatatagagttgaaattcaaatgaagtttggacattacttctaagagcttgaggttatctatccttcagatcaaccaccaaagttgatttgatttcacccctcaagccccaaggctcccacaacttaagaaacaaatgattctcctgtcagagaacaaggataaaaaactccagagaagtgctattttttccttagcaacaaggggagatatggttccagattcagaatcaatcacaaatgtgatttacatggaactgaatttttatccagaggaaacatatttacttagtaaatagaccatcttgaaggagggcaagagtccagaaataaaacaactttcattctgagtaagggaaaatgtggtgtgggccttcttctccagtgatagatgtacagaattttatggaccaattatagctgaagaagattaggtttctttgaattccacaagatgaaaggtcctgtcactcctttatcagctgccttctagaagtttccagccatttacctatctatcccttaaaccatccactcagccattcattcacttacctaccaacccattcattcaggtatgcaactaaccattcacccaacaactcactaatccatccttccactctccttccatccctttctccatgtatccactcctctctccatccatctgatcatcatccatccatccatccatccattcaatgatctacccatccatctatccattcatccatccatccattcatccaatcatccatccatccaccctacatccattcatccatccattcatgcatccaattatccattcaatcatccatccatctatcctaccatccatccaattatccatccatccatccatccatccattctttttgttctccaaacatttattaagcacacaccatgtgccaggccctgcattaagtactaagattataaaaggatacaaagataaaaagagtacaatttctatctgggctacagactaacagggagagaggtatgtataaagtgaaaagaatgtgcaaatagcaggaaataaagggggcatatgaggccaagaatgagacgtgctctctcagcctgaggtggggagtaaggctttctgaaagaagcatcttataaattgagagttgaataaaaaggtggcattggtcagatgaaagccagaggtctggcagggagaggaaagttgatttcaacacagccagccacatgtgcaaaggccgagcatccatagcgtttctaatggtacagtgctggaatatataagctctacattttgggttcttaagggattgtctcattcctgattgagcttcctgaattcagatccttgcttgggctctccctacctaaagacttggattttcatttgtgtttgcattcagatgttgactgaatcttggtcaatattgtcccagattgtttggtaccaggcctaaatgccacagtattactcagagcaattaacctttagtcgtcaacccaacatattcaccatacccctgttgaacaagagactgggcttttctccagctcatttctcctggcccaggctgcctactggcagacttgtaatgcagaattattttgcctgcagcaaatattatggaagctttcttggaggtctgaggttaaaccagtgcagagtttgctttttgcgtcttcttggcatcctcaatggggacatcatatgccccagcctttttctggtgaggctaaacattggaaaccaatatctgtttccttcacatttttacataggatacaacttcatagcatgttggcactcatcatttggaatagtaattcggtgggcaattcaaacctgtcactctcaaaatgttgtagtgcctgacactggatttgtttgtaaacttaagaaaaagtgtgttggaattggaagggctgtgtgactttgggcaagttacttagagtctctgggcctcagttttctccacctgtaatagtaggcacaataatatacctacctcatggaatttttacacaagttaatatttgaagtgttcagaacagttcctagaatacagcaagcatagaagtgtttgttaaatagaattaaaaaataggaaagaggtgtagagtagtgaaatccatttatgcctagtgttccatgattggaacactaagcatgtgggagttatctatatcctactgctcaaggtcattgccaaggtctgatttttcaattcaaaaaattgcaacttcaggcataaatgggttaaaagcaaaggtgcaggagccaggtagatttaggttctgatgtgaactctgccatcttctcactgtgtagccttgggaaagctaattaacctctctgacagtccagttgctgtgaaaatgaggctatgacagttcctccctcttaggatggtgtggggtttaaatgagataatgcacagcacgcgcttggcaaggtgctgtcataaaatatatggtggttgtttgcttctatgtcattattattcaacttaaggtctgagttggccagaatgaggaattatgaaatcacatttgcaagaggaaagtgaagccctgtccctgggaatcccagccgtctgcccttctcctgcatgtcctccagcatccactcagggataggaatctctgcaggtgggagaaggggcctcggttacttctgacaacggtcctgggccacaggtcctattgtccttactttataaacgtgggccctgaatgtttggtgacctgcctaaggtgacccaagcactacgtgacaaagacagcatttgagcccctgtcccctgccccactcttggcatgcacacgcagccctggaatcagacaggcctgggtttgaatcctggctttgatacttcctgcctgtgagactgacagtgagtcacttcattcccttcagctccaaattcttcgtctgtcgagatgactagcaatggctgctctcagggctttggagaagatcgtgtaaggcagaacataagaagcgttcagcgtcatgcctggcccacagtgagtgcttcatcgatgcctggcacataaacttactgtaatgtatactgctcttattactcagcacattctcaacgctactctagatttccaaaagaggagagatttttgaaagccgggacctccagcttcctcaccctagaatgatacatttatgactgccaatttcctgggaatcgtattttttttttcttgtctgggttacagtgtgtaaacgttcataaaaggacactgccctgtttgaaagccaagaacagctgttcggagagcatgtgttgtagggaacttctcaaacaatcgcacaccctggccaccaagtttgttttctgaagggtggctttggatccttgacaatatctattactaaaaagaaagtgtttcaggcactgggtccttccccatcagtttctacttctatgactgtggaattataagtcagtggatgaaatccatgagagccatccagtggtgtatcagcaagggtcaaaatgacacagatgacacactcgaatatgaggataattcaagggacattcactgcctgacagattaattaccaaccttcgagtggggcgtagcaggacaggataacctggaaacccaggggtagcaacagtggaccccaaagacagagcatgggataaagctatatccacttttttttttttttttttgagacgaagtctttgtctgtcgccaggctagagtgcagtggcgcgatctcagctcattgaacctcttcccaggttcaagccattcttctgcctcagcctcctgagtaacacaggtgtgcgccaccacacccggctaatgtatttttagtagagatggggtttcaccatgttggccaggatggtctcgatctcttgacctcatgatccaccctcctcggcatcccaaagtgttgggattacaggcgtgagccactgcacctggcccagtatctgctttaagaacagaacagggattttctgtctaaggatgctgccaatctgaggttacctcactctcctcccttcctataatttcctacctgggatcctcagcagccaagcccaaccagaagcccaaggatagaacactacatcaattgtgtgttgccatcatccatacatgttggccttgggaaacagagagcagagatgggtgggaagtgaaccaggaggggcacacagaagcaatgcggcaggggaggtgagggcaatgagctgcgtggattcagaggcactggagaagctagtcccattaagatcaatcagactgatcaactgttgagctagcaattcaaagtaccaactaaagttgggcaaattttctacaatagcaagcgtgtcatgctgcattgcgatctaaaaaacactatatcttttgtgaggcaatatatcgtaaagcccagatagcagaatgattggccgaagtaaaatagatcatattattcacctctactttacagttttactggatcgacttttcctccactccatcccgaggatgctcacagccctgacagtcaatgggaattggctattccctggtctgggtactctttttatcgacgtgttgatttttaggcctagtaactcagttgtgtttgctcccatgcctgcttatgcctgcagtacctgttaatggcaattgaaataattaatacctaattcagtaaactgtaaggataaaaataaagagagttgttacttctgtgaaaattcagttacattctgtggggaaataaaatcagcaaaggccaaccattataaaagaattgcagtcaaagtatgtgtgagccaggcaattgttaaatgatgggggaatcataagaatctagaaggattctatttataatttatggttggtagtcccaggtcattcccttgctcccaattcaagcccgtagccaggcttttaacattcttcccttgggggatttttcaagggtgacagatgcttctgctctgtggtcaattgctaaaatggagaagaggaatccaagccttgctcatcttctggaattttccacatctctttcctttcatccaaagactttgcttgtgcttctttccctcttgtgctccagggacaccttggaaacttccttcattgatcttttaatattaccaagaatgggacatgcccttttcatctgaccatttctgctttatacctgaggtatactgaagattccctgaggtaactgagaaggctttgagtatgaatgtccctcctctctgctcatgtggaatttttctcacttgccatgttacctttggacaatttcgttctatgcctgcctcttctctagacagtaagcccctgaggatggggaacatctctcatgcatcttggtcccttcaatgtcctggaattgctctggaatattctaagcagtcagtgaatgcttgtaaaatcatctgaaaagtttttgaaaattattgctggagacaccaaaggacccaaagattttgcatttataagtaataacacgttatccaagctctttagacccgaaggatgtctggatggggctatggcgaacacacctgatagcaataacttaagcatacctttagaatgaccctgtatggcagatgaacctcgatgtgtgttccgagataggggatatggaagtggccagcctagagagtcattccctgtctatgaagaacacctgagccccggggccatccactggaacatggaccacaaaggggattgaggccctgagtgttgggttgaatgactgccaggtggaggttgttagggggagggtgctacatgaaagtgctatataaactccttgtcttttgcaagctattgcggttcttctgctcagctcaccgccactgggccacgtggttctcatgtccagtccgctgccactgaactctctccccagtacgtaagtccccagtaaaaccccatgtcttgattgctggctctgggtctcttcttcagcctcttgaacctggagccaacctattggagtcaataggggtttggtgtaacagaggactaagcttgttgaagatcagatttgaaaaagcaaataatcaaaagtagaaaagagcaggacactgctaggtcatgcatgatggcctcaataagtttgttccattttttccttctaatgacttatttcttttctttgcctgaaagatttatgtatctgtagggaatacttttgggtgcaagtagcagaatgcccaacaaacagtagtttaaactgtaagttcacttatttatttcttaagaagtccacagctcagcagcccaaaggtgatacagtggcttaataatgtcatcaaggaaagaacatcttcctgtctttccactgaattatcttcagagcactggctttttgtcctgggctcataatcttgcagttgtcactaatttaaatgtcacatcccaacatggcagcatccagaacaggaagggaaagggtcctcttccttgtatggctctctctgatgtagggaggaaaacgtctctaagaaactctaagagttgtcctttcctcattggccacacctgagccaattgggtgacttgcccacgtgcagacaaatcactggcacattttaacctgttgccacaaactacaaattggcttgaagcaagtgtggcttatccccttagggatggatccatcattgtctggaagaataaacagggtctatttgtaaagaaatggggaaccaacagtgtcttctgcaatgtatttgttaccatggcaaacacatgtattgagatacatgcctttaatgtgggagtttttaagccatgagagatatctcaggaagttcatcaagctatctgtgttcaccatttgtccttccctgaggagtagctttttttgtctcaagatcaaagatagaggtttccaaacatttaaaagacaacgttcaggtttttcttgggagatagaggtgcacagaatgtcagggagggaaacgggctggtgactgagaaaggggaagtgattccaacctggtagacaaatggcaatgcctagtaccaagaaaaggacaacacttcttttgggggattgctgttttctgtgggtaccagataccagcaccacctttgccttcagtcttcctggtggggggcagctgtgggatggtagtggcatcaggcttctgagtgcagaggttctgggagcagcaatgtgagtctctgactctcagcctacggtcaggggaaaggtcatctgtgaagagcatctctgagctgacttgaagcatcagagttcagcagatggtgcaagcgccagtcaggagcaggcaaaaggggcagaaacagccactgtaaccttatagtgactccccggggactctgaaacttcagttttcttatttgtaaaaatagggactgtggttgggcatggtggctcacacctgtaatcctagcactttgggaggctaaggggggtggatcccttgagtccagaagctcaagaccaacgtgggcaacatggcgaaactgtctctaccaaaaaatacaaaaattagctgggcgtggtggtatgcacctgttgtctcagctactcaggaggctgacgtgggaggatcctttgagcccaggaggcaggggttgtggtgagctgctgtactgcaggctgggcacagagtgagaccctgtctcaagaaaacaaaaacagaaaccaaccaacaaaaatcggggtcaaaactgtatctatctcagagatacgattaacaatataatatggtgaaagtgcttagcacagtgcctagcaataataaacctactaaataatagctgttataatattattattttctgatattgtatgattatagaaaaagcagagactccacaaccaagatgaaaatggaaattctcagaaattgagttggttaagtcttggagctaaattcatttgataaagaaaaaagaagagatgtgatgccatttgaatctcaatattggggagcaaattcctatctactatattaaggaactaattgaaggtccaagtccctttgagaatcatgttctctttggagtgcagccttttcaattctactgctaatggtaacatagctgaggcagtcacactgttatccagatgtttctgtcacctgtatgctgaattagacatattatggtacagactgtctgtctaccatctaattctgtcatctttgtctgtatgtatctaactattgctatctatctgtgtctatctatctacctatctctgtctatctctctgtctgtctgactgtctatttatctgacctatttagttcttcatctgtgacatgcaccataacattgtctcatttaatcctcacaacaactcttcaggctagaacagaggctttcaaacttcttggaaaagttacaactaagacaatcacttttcctgagaactctgtttatagaaacacacacacatctgaaaaagttgcctatacttactccatgtgacacattctattcaattctatgctactgtattctattctggtccatttaaaacataatttattgtgggtcacaatgtggcttttatgaatcattattcaactgagttcttgttattctccatttatagaagagaaagagttgggggaggttacagacagatgggaagaagcccagctcatcagagtaagagttggaattgaaccaatggcttctctgatgtccgagcactgaccatgatgccctgctgcctctcacggtgctcctctgaggatgggtgcttcacacccagctagttccctgattattttacgacggccattcaagcccacccacctgcctctagctcagtggttctgaattctggctgcatgttggagtccttggagccactgtcctgaggatgaaaattgcatagacctggactggggcctgcgcaggagtactttgtattattttattccaacctatttctatctttagatctaaagtgagtctcggccaggcgcagtggctcacgcctgtaatcccagcactttgggaggctgaggtggacagatcacttgaggtcaggagttcaagaccagtctaaccaacatggtgaaacccaatatctactgaaaaaaaaaatacaaaagttagccaggcgtagtgacaggcacctgtaatcctagctactcgggaggctgaggcaggagaattgcttaaacccgggaggtggaggatgcagtgagccgagatcatgccattgcactccagtctgggcgacagagcgagactccatctcaataaataaataaataaataaaaataaagtgagtctcaacctgttgaactattctaaaaaatccattctgccaatctgtgcctttaatttatttacacttaaagtaattactgataaggaagaacttacttcaaccatttagctgtttgttttctgtatatcttgtatgctttttgttcctcaattcctacaatactgccatttttgtatttagttgattttttttgtagtgtatcattttgattttttttttttttttggtatatgtttcgttattttcttagtggttatcttggggattgcaattaacttcttgtacttatcaaaccctggtgaacaataccaacttaatttcaatagtataaaaacagtctgcccctagacatctctattcactccccctccatattgttatcgtcacagattatatctttgtacatgtgtgcccattaacaatgacgtataattattgtttcatgaacctaacttttaaatcatatagaaacaaaaaaggagttacaaaagaacagtaggtactttgcattttttaaagtctacccatctcatttcagtgtgcacccagggttaagaatccccgcagggaagagcctaatcaggcgcttacttcttcctgttttagtgggggctgagattgcaaagcaaactagctaatttgctgggacatttataaccagggaagattaaataatatgtacaagcagaaacacaaggcatattattaaagcaagcatgtgtgcaaaacacagtgtcctttcaattgcagcattgtttgcctcttccgcagctggctcccaagtatgtaataccgctgcagaactggctgtggggaggaaaaaatgaagtgcacttctctgattttgtctggtgccatccactttcactcaaccttccctcaaggagagaagaacaatactcccattgagtcgcctttgtagcttgaatctgaatctgctttaataattcctgtttttctgtttgtgtataattatttcaactccctgggtcactaagtcctccctgaaatcggagggctgccttattttcatatctatggtatagaaagcccaaagaatacagtcaaattgaatttcctccccctgcataaatggaagagttcatgaattctgttttctccacatgaacaatctattcttgggaaaagagaattgccctttacgaatgatgaaggaggccatcgtcaattgggtggagtccattttcttcttaggaagcagcatgaagaattcatggcttgtttgtttcctgatatgggaaaaattcacgtgcataacagcataaatcccacccacatatttaggtaataaattaggatgaaaatctcctacgataattagatttgaaaatgccacgttcctgtagagctatgcaaataccttagggagtggactatgatgatgttccaataagcctcagtgtgtctagctgtgaaatgggcaacaaagtcccatcttctgaagaaaggctgacattgtcaaagaaaatcatgaagtgccacatttatgactagctttgagattcatggtctttcatttgaaaaagatacaacgtaatgcttcataggagttatcctaatagctcgctgcaatagcaggcgctgatgggattcttgcctgctgtaccgcgtcttggcaaatactgatgtgggattattttgttcgatcccaataataagcgtatcagataggaagtgatattaaccccacttttcagacagcaaagcaggggttcaatgaggttaacccatttatgcctgaggttgcaattttttaactttgaaaaatcagactttgagaagcaggatataactaactcccacatgcttagcgttccaataatggaacactaggcataaatttaataagctcagttataccatctgaaaagtggggttaatataacttcctcacttcatataacctgcagacatcattgccaggataggaagacaggtcgcagggcaactgaagacctggtcacttttccccagagttagggagatgtaacttgtggagagctggatgcttttaggcattacacaaatgaattccatgtatttatttatttatttatttttgattaaaaatttttttttaaaattctactttaagttctagggtacatgtgcacaacgtgcaggtttgttacatatgtatacacgtgccatgttgttgtgctgcacccattaactcatcatttacattgggtatatctcctaattctttccctcccctctccccccaccccacgacaggccccggtgtgtgatgaattccatgtatttaaatgaataaatcaagcaacaaatgtatcaagtaatgtcacacacttcattggacaaatattattactttagggcaagaactaataaaaacaaaatgaataggttacagaaaaaatattgagtaaataataatccaggtagtacatgtcagaaatcttaatagcttattcaaatgactagaacatattttttaaatggtggaatagaaaatgtgaaggccgggcatggtggctcacccctgtaatcccagcactttgggaggccgaggcaggtggatcacctgatgtcagaagttcaagaccagcctggccaacatggtgaaaccccgtctctactaaaaatacagaaaattagccactcatggtgatgggcagctgtaatcccagctactcaggaggctgaggcaggagaattgcttgaacccaggaagtggaggttgcagtgagccgagattgtgccactgcactccaacccgggcaacaagagtgaaaccctgtcttaaaaacaaaaaaaagaaagaaagaaaatgtgaaggaccctttatatttttttaatgagtggactcattatttccagagtcatagcccccaaatattatcagaacctctaattgtccaggggcaggggcacattcccagttctccttttgccacagggcacagcccaatgctggagccctgcaaacccttaggaaactttgctgaaagtgtgctgtgtccaaaggagcctaggcgactttgctgatctgtcaccaacttgctgtgtggctttgggcaagtcacttcacctctctgtgccccagattttttctgtataaaataaatgtgtgaacaagtttgtatctaaagtatattccaatgctatgtttctggttggaatgagctaattaattaaaaaattactaagtggatattacctctagctattttggggggaagtaccctagcctggggatttagagtgggactctgggtgcagaataactggtttgaatcttgtctccaccacttttttctttctttttcttttctttctttcttttttttttttttggagatggagtcccgctgtgtcgcctagactggagtgcagtggcgcgatcttggctcactgcaacctccgactcctgggatcaagcaattctcttgcctcagcctcccgagtagctaggattacagcacccaccaccatgcccaggtaattttttttgtatttttagtagacatggggtttcaccatgttggccaggctggcctcgaactcctgacctcgtgatctgcccgcttcgtcctcccaaagtgctgggattacaggcatgagccaccacgcctggtcaccaccacttctctctgtgtggctttaagcaagttacttaaattccctgcacttcagttttccgtagagttcatgtacatcagttgtcaaagggcagatgtctggcacattggaaatattaccgaatgttagttatccgtgaatcgggggactgattttataaccacccaaatcatatttatttcctagaggaatgaagatgaaaatagtggtggttagtgtctagcatcgcactatgtttgccaagattaatttgcaatgagccgttttcaaacaggatgttcagccactatatgtacttcttgaagtaaccagcaggtggtgaagttggattatattttagatggtcagggcctggtgtacctcttgcctggggttttgtgagagaaaaaaaatagctttcttttttatcagcaccccaaaccattaacatctggaatcaatagaggctgtatctgtcacttaatgctatagaaattgcaagaaaaaagtcctgctggttagtataccagttctcaaaatgtcagcatcatttgtgtcacctgggggtacttgtcaggaatgcagtctctctggtcccaccccacaggatggaactggaaactaaggatgagcccagtcatctgtgtcttcaagaactctccagtgattctggtgcacttgtgttatagaaccgctgtgctagaggtcttagtatttgctgtgaatgtgagtaggtaaagagagggtatttggtgagtgtcactacctcagtgcaggccagggaccagtggttccacatcaatgtgggggagtgttagaatgcatggtctctggccacaccccaaacaagctggattgaaagtcgcattttcatcagctcctggagattctcctggagattctcctgtatgatctctttctctttttctttccttctcttcctttctcattctcctctctcttcccctttgccatctccactgctccctttctcagtgacaattgggcatacccctcgcagtgccggctgctcaggtgggaaagtggagaagactcttctatttcccagcctgagaaaatttgcttacctgtaatcccagcactttgggaggctgaggcgggcagataatttcagcccaggagtttgagatcaggctgggcaacatggcgtaacttcgtctctacaaaaagtacagaaattgacccagcatagagtcgtgcacctgtagtcccagctattgaggaggatgagctgggaggatcatttgagcctggaaggcagaggttgcagtgagtggagatcgtgccactgcactccagcctgggacagagtgagaccctgtctcaaaaaaaaaaaaaaaaaaaaaagaaagaaagaaaacttacttgaagcctactggagacagacagctaaacatacagtgtgggacacctgtgctgccacctgagtgccaagagcagggaaggaccctttgggttgggagcttcgcacagagggtggccttgagcagcacctagaaatccagttgagatcttcactttctccacatcctcctctccccctgtcgtctgttgttctttttctacttacctgccttctggctcttttcacctgtggataatttattcccacaactcagtctcaccaggatgacttaaagtctaaagtacacgtcagtggttctcaaagtgcagtccctttccagcaacatcatcactttggaacttgttagaaagacagattctcaggctcactccagaccttgttaaaggaaactttaacaaggcttccagaagattctaacacacatgacagctagagaactgtggctttagatggtggcagaaattgttcattgcctactcaagccacgggttcaaattcttcttggtaacagacccagataggggtccaagtttcaggtgagtaacaaacactgttctcagaaacagtaagctctttcccttgccccaggggaatgaaatacgattcgtctacactgcgattctacttcgcaatgacatgtagtggcaaattggggacccaagaagcaactgatggcacagtcttaataaggtaatttaacgggcatttcctgaaaataggctatttataggaatgtgaatgtgtagtaacgcaaggaagagtgaagtaaccacagaaaacagcctgagttgccttccctgtgagaaggatcccttcaactctagacctaagggagcaagaaaggagaatttaggagagagtcaagttggggagtccttgacaggagcaatgaccttatctcaaagtcctcatccagcctgaggtcaagccaggggggatgtcaggggactccttcccctctccccatcattgtcttctctccctgagaccttgaactggcaccccccattggctgagaccatccgggtatacaggaaccctaaaatctttacaggtaggctttaccagtctacatagggtattaaagagcagaatatgagtttggggagcaaaaggaagacatcctgttcattggtctaggggtgagcaggtggcccaatctggccaatgagacatatgggaaagtctgctggacgcttctggaaacattttctttcctgactgtcgtagaaagaaggctctcctttctacttgcttgggatgcttttgagaggttgcacttcttggactttgaagccacctttggccacaaggggaatgcaaagagaactactgtcaagaacctggatacccacagagctattaaaaggccttggaacccccagctccagccttcttgttaagcaaacaatggatgtctctatagtttaagcttctgagggttgtgtgttctgtaatgggaaaatctgtggagttattgctaggaatggtaatggtgaaatcattaaaacacagaccccaattcagagtcaaattcagctgtgttgatgcccttggatctgattaaaagagcttccttcttatttgagtaggggaagtggattctggaagacaatagaatatggacatggaaaggcatccctgagtgcctgaggagggggcttctgggggaagagcctggcagtgatgcctggagagtcagggtcacacccctggcccaggcagagggcactgctcaaaacaccttgtacctccccaggcaaggtccttgtaacccatgacctcagagcattgagtactttagctcagcttcatctgtgatagagaggagacagctcagcctgtctcctgtgaggggaagatttctgtgtgtctgaaggaaaagttctctgcactcgcccaatgcacagcacttcacagctgccctcaccccagcatcgcaatcctctcaactcctgccctgtatcagcctctcccctccccaaacagacaggcagccaggagtaaggccatggtggttgactcaagcatctctcttcccaggctgaagttccacaggtcttgctctaccagctacagtcctgtgacacttagcaatggggtatgttctgagaaatgtgttgttaggtgatgtcatcattgtgggagcatcatagagtgtacacacacaccttcatggcatagcctactacacatctaggctagatggcttggtctgttgcttctaagatacaaaatctgtacagcatgttactgtaccgaacacctcaggcaaccgtaacacaatggtaagtgtttgtgtatctaaacatagaaaaggtacaatacaaatatggtgtaaaagattaaaaaaaaaagatacacctgtgtagggcactgtattagtccgttttcacactgctgataaagccatacccaagactgggtaatttacagaagaaagaggcttaatggacttacagttccacatggctggggaggcctcacaatcatggcaaaaggcaaggaggagcaagtcacatcttacatggatggtggcaggcaaagagagagagcttatgcagggaaactcctgtttttaaaaaccatcagatctcgtgggtcttatcactatcacgagaacagcatgggaaagacccgctcccatgattgaattacctcccaccagtttcttcccaccacatgtgggaattgtgggagttacaattcaagatgagatttggatggggacacagccaaaccatatcaagcccttatcacaaatagagactgcaggactggaagttgctgtgggtgagtcagtgaatgaagagtgagtgaatgtgaaggcctaggacaggactgtgcacaggactgtggaatttacaaacactgtgcacttaggctacactaaatttataacaacatattttcttccttcaataataaattaactgcttactgtaacatttttactttataatttttttagttttttaaactttttgactttttgtgataacacttaaaacacaaacacattgtatagctgtatgaaatatattttctttacatatttattctacaagcttttttctattaaatttttctttttatactttttaagacattttgttaaaaaacgaagacacacacattagcctaggcctacacagggtcaggaccatcaatatcgcactgtcttctactttcacatctgttcccactggaagtcttcaggggcaatactatgcgtggagctgtcatctcccatgataacaatgccgtcctctggatacctcctgaaggatctgcctgaggctgttttccagtttttttttttttttaaatttatagctagaaggagtgcactctaaaataatgataaaaattatagtatggtaaacacaaggcaataagaatattttgattccattataatcttatgggactgcagtcatagatgtggtctgtccttggaaatggtatgtggcacatgactgtgcttcgtctgcctctatcctctcaatcccaagcgcctatttctctaatagtcagaggcactgacagaaagtcaacacacgcattctgactgagctgcacagtactgaccctgttagtggctctgaaagtcaaaaacgctttagccttccatcactaatctcattcctcttttgtttgtttgtttgtttctttatttatttatttcctgagatggagtcttgctctgtcccccaggctggagtgcagtggtgcaatctcggctcactgcaacctctgcctcctggattcaagcgattttcatatctcagcctcccagatagctgggactacaggcatgcatcaccatgcccagctaatttttatatttttagtagaaatggggtttcaccatgttgaccaggctggtctcgaactcctgacctaaagtgatcttctcacctcgttttcccaaagtgcttggattacaggcatgagccactgaacctggcatcattcctcttttaaagcttattcaaaccaattactttcattgaacttgccaagaattaaatggagaggaagaggtttcatgttaatcaggactcctctttcccagcttcttgagtcattttgcttgagaacaaatatgatcaaagtgcagagtgaaggaaaggcatacgtagaggaaagggggcttttgtatgccaagccctgttcccacacctcatatcatttaatccccaaaccataccaatcaccccattgtacaggggagatactgaggcttacaggacgtagcctaatcccctgcaggaaagaaggtgtggatctggaactgaacggggtggtctgggaagaccacctcgatgaggtgacatttgtctggaggtcacgatgaactgagaaaacaaatgatatgaatatttagaggaagaatcttccaggagaaggcagtgaagagtgcaaagatctgagagtgagcaggcttggtaagttccagaaagagcaagatgactagtggagtggggtgagaaaaaaaaaatgcagtgggtgaggtcagcagggtggaaggggtggggcagataaggtaaggtcttgctcgattgtcccctgcagtcacacatatgggactcaccccattccctctgcttgctggtccctgtccaccccacatggtagcatttcccatgctgagtcaaagtggtctcttcacatctgtatttcccccttgactgaattccctgcatccagctttgtattctggctcccaatggagtcttacctacaggcaggtccctttgcttgagccggggggcaaatgaagtttcttgcacaaaatcagattatgctggaatgcagacacatctacaaaactgtgcttcgtaaaactgcatcatctttttcaagaatggtcagtaccttcctggctgctctctgcttgtgaaaaactgagtattttctattcctctttgaaattcacatggaacataccagcatataaaaggccctgggaattgtggaatcaacagactttattttgttgaacctacctttgatttaaaaaaaagtttgttgagcattagaattttcaaaagacatatggctttctagcagaactagttttccagggaaagcaatttggaaaacactcagttgagtggagcagcagcaatgggaatcaagaaatagatttcgtgagacgtgttcattctttacaaggcctaggccttttaatattgccagtgaagggtaggaatggatgaactttttcagaatgaattgattaattcattaatcattaatgaattaattcatttaattaattcattaatgaattgattaaatgtgtattcttaaaaatatagggaatttggttagggaaccacagctcttgcgttagatgtaaattgctgtgtaacaaattacaacaaacatggcagctttaaaacaatacacatttataatcccacagtttttgtgggtcaggactctgggtatgggttaactgggttttctgctcaagatctccaggctgaaatccaggtgtgggctggactgcactctgatccgagtttcagtgtcccttccagttcactggttgttggcgcaattcatttccttgcagcggtagaactgagaatcccttttctgctcaccgtcctccagggacagctttccacccctagggggcgcccacagttccttgccatgtggctttcctagaccattcacaatgtgacgtttactttctcttttttaatcttttttattattatttttaattgacgcaataatcgtatatatttataggttagagcttgatattttgatgaatgtatacaatatagaagatcaaatcaggataattagcatatccatcatctcaaatagttatcatttctctgtgctgggaacattcagagtccactcttccagtgatttgaaaatatacagtaaattgttaatgatagtcaccctatagtgctgcagaacactagaccttgttcctcctatctagctgtttacccaccttggttttccctcctgcccctactctacccaccattccctgcctctggtaaccattattgtcctctgcttttatgaggtcattttttttagcttccatatatgaatgaaagcatagagcattcatgctcatgaaagatgagatttatctttctgtgctagactcccaaagaaacaggatcagcacctgacaaccgctgagctttcttttgacctttggatagtagttgacagtttgttttccttctgcaggttcattgctaggatttccccataatgcatgtgttccagtggggaatgtggcacatcccaggcaaggtcactgaggatttttgagcaatcattttctccaggtcactgtggtcaccggggcatagaaggtgaaatgctccagtctgtaactggtctagattggtagtgatggaaaaacattcttattgtcagtgcccagccactgggcggtggggggggaatgccagctggcaggggcactgagaacaaaaccaaatggatagtacgatgaagcaaggatcaccaggtgcataaaaggagaaacaactaccatttatcgaaggccagtaatgtgccaagcattgtgccgagtgctctttttgcagatgagaaaactgagtcttggaggttttatagctcatccaacgtcacacagctaggacacggtaccagggtacaaatatagactaacacaaaactcaagttggaacacaatggttgcacattaaatcattatgtaatgcaaagagctggcctagaagatggtaataaaatggcttacatagtccctgtcgtgctggaaaagtggtatttataagcaagagctaagcttgcctttaaatttgtcaagctttggaattgagttactgtttctggacatgtgtcacacctatacattgagatgatattctctttgcctggcaaaataacgaataagcaattgtaaagtcttttgatttttgtagggaactatcataagccttcctgatcctccctaatcagcaggctaagtcagtttgctgccatacatagaaggagcaggttttggaagagacagttgccagctctgccggtttttatgttagtgttcagttagctcacctataaaatatggataatatccgccagattgtaagactcgaatgaatgatttaagttcagtgcttagtaggtattcatggctataatatcctcactggtgtagcagagaagaggaaaaagcaatttattctaaccgtggatgctgagctgtgtatgaaatgtgacttgatttttttgggcagtggagcagtgggggtgggtagctgctatcttccagaaagggaaatgtgtgggatgatgaagaaagtactaaactctgtacccaagaactctgttcaccatcttcccactggcctctgggcctcagtcttctaatgtgttaaaatgaggcttttttagataaggtgaagtctgcagggtatttgttccaaaggatgggtgtagggggttaataattaaagcatgctgtgatccaattagggaaacaattgcaaagcaaattaaacagattattgttattatccttagacttctcagaacctttaatgtgccaatgtgtgtgctagctctcctagaaggggcgtggtagagagtttcccaaactaatttgaaagatgcattagaaacattttatttccatcatccccaaagctcctcttgacctgaaattctatgattctaatatctacgtcatgtagaatggctggttctttagaggacagtaacaacatttttctagttttgacttaggattttggataaggcaaattctacttcctgttacctctggagacatacgcagtcattcagttatctctcttgcctttgaactgggtatacatattcagttggattatttatctctggatttgaaaggattgcatttaattttgaatcaaggggaaagtgatcgtggtgttctgagtcactagtgaagccagttacaagccagcctcaaagcaagcacagtcttgcactgattaggaaacgttgagagaagatggcagccagaaatatttgaagctttaacaccaaacagttgtgacagcaaaggtctccaatttttgcttttcatcttaatattatctttatttataatatttttaaatgatggaactactaaactgaaaaatagtgaaagctactaattattaaagtgcttaccatgtgctgttgctattctaactgctcttcttgcattatagcctcagtttcatccctgagagacaggtcctattttctccattagccaggcaaggaaacgggcagacaaagcagattttctgaagttacacagcttagaggagagtggtccaaatcccgtcttcatcagttcctggccatgtggctctggccaactggcttatttgctttaaggtttgttagctcttctactaaactggaataataatgaataataataacaatgataatagtttctaaatgacgaggtcgttgtgaggattaaacaagctattatatttatggaatgcagtgttgcctgcacagtcaatactcaaaatctgctagctattattttaaaattatggttattattactatattgacatgtatgttaggaagctgttattctatctcagagataatgcttttaatataaaatataaatataattgtgtgtatatgggataggtataaatcttaagctattaattcactgttatgcctttttaaagtgtgtagattatgtagtcataagttaatacctatagctttcattctttttccaatgaaataaagctgttcattaagagcgtcatgtgaaccaaaaatttggaataaaatcatattgaattgtaccagagtaggaactctcatagagtactggtgggcatttgaagttgcaaaaaccatggagagggaataatttggcaagatctagtaaggaggaggctgtgcatgcctgtgacctagtaattaatatcctggagggactcacacatgtatacaaggagacttgggcaggaatgttggtggcagaaggatttgagatagtaaaaaatggaaaccaactgaaggttcagcaactagataaaacaaatgaattagagctctaagtactggcaaggtaatatcataaaagtaaaatattgaattaaaaggaaattacaggaaaatatatgcagaataaaatctgcaaacagtatcataaaactgatcatgaacatattcatatattgcaaaaatatcatacaagcttgaaatagtgaataccaaattcttgaattcagaatggctgttgtttctggataaggaggaacaaagatgggtttgctgaaaagaaggcagtgcaattcaactgcatctgggatgtgatttttatgaacgtgttggggcatgaatgaccaatgccaagatttgacaaagctggatggtggctgcttttttgtatgcttgaaatgtttcataattgtaaaaaaatcccattttattacttgttttgccttctctcctctttttgtcttcatctgtttcatagtttcaacagacttagcaccttatgtctaggtgtacgttttgaggggacagcaattttttgtgctacaaactttctgtaagaggtcttggacttagggattccagttctcagtgttagaccttgttttctgctgggttcagatgagaggtcatacagtgcaagctggggcccaagttgagttaattatttaataaggcttccacttagtctgtgtaaactccacgagctctcctgatggccaactcattcacactccttggcccacagagggttcagaagggccaggaggtgagacagttggtgagaacaaacggcatccttccctgctgtttatcagtgtttctgctgcttgctcaagtaatcaacagcataggtagggcttaaagaggaaatccggtgcctgcagaattatgactgacctattgaggaaaggttcagagaggctggggagtttgtgaccttccggttaaagtgtgacttcaaccaaggcagaccaggagggtgggtgaggcatccagttcatagatgagatcagtgtcaacgggtacaaatccagcagggtgactccatgcgtgtgtgtgtatatgtgaataacacaaagcatgtcatgaaatagatgcattaaatctgaagtatgtaatgttgtatataatgtcttaaaagttcccaattcagcacaccatgaaatgtctaaccatgacaattaaacaatgaaatggctcgacaggaagggcttttgcattccttacagaacttacattccaaaaaagccaggtggagacataaaacaatccttcctcatagatggtttgtgttgtgttggtttattttattttattctattttattttgataagaacatgtaatatgagatctaccctcttaacagacttgtaagtgtacagtagaatgttgttatctatggcacaatgttgtacatgggtctctaggacttacttatcttgcataactgaaattttatatttgttgattagcaactcccatttcctcctccttccaaaccctgttaacctacattttattcttcatttttatgagtttgactgtttagctagctcttataagtggaaacatgcagtgtttgtccttctgtgactggcttgtttcacttgatgtaatgttttcaaggtttattcatgttatcacatatttcaggatttccttctttttaaaggctgaattatattccgttgtatgtgtgtgcatgtctatggaatataattatacatgtacacacatacaatggaatatatatatatatatatatgtatatatatcacatttactttatccatttaccctttgatggatatttaggttgtttccacatcttggcaattgtgaataacattgctatgaacacagtagtgcacatacctcttcaagatcctgaattgaattcttttggataaatactcataagtgggattgctggatcttattatgaagcaaaattagacaagtgggactacatcaaactaaaaatcttctgcacatcaaaggaaacaataatagagtgaaaggcaacctacagaatgggagaaaatatttgcaaattacatatccaataagagttaatttccaaatatataacttctacaacttaataccaaaaaagaattacctgattaagagacgagctaatactttaataaatatttctccaaagaagacatacaaatagccaacaggtatgtggaaagatattcatcactaatcatcagggaaattcaaataaaagccatgaggtatccacctcacacctgttaggatagcctttataaaagaaaaaaaaaaccacttgtgtgctgttggtgggaatgcaaaatggtgtgcagcttctatgaaaaatagtatggaagtttctggaaaaagtaaaactggaattaccatatggtccagtcatccacttctgggtttatttgttttaaacacatgcatgtgttcacacacacacacacacacacacacacacacacacacacacagcctttttcctttttagcttatttattttgtttcatatgaggaattgagaaagcaccatggggtactggagccatggtggtgatagctttctagaattatctgagactaactgtgtggtcagaggcatttctcatctttgttcttgggccagttggtctgacgaggtgagaagctggatggggagccccctcttcagggaattctatttcccacttcaagagtgaaccgtagtcatcagcccatgggctttggtgtctgagagatgtgagttcaatttgggctctttccagttctacaacttgatgcaagttactcctctgagcaataatattcccagcttaattaataaattaattaataaatgctcaataaaaattatcattactgttattattttattaatttcatttgtaaagcaagtcttctatgtaaccttccagtgaaatcaggaaagaccctactgtcataatttaaaacaagttttgtaaaacttaattttcattcctttatcattggtaacattcacatggttcaaaagttactaaggctatcttccccagggccttccatggaggccttcactgtgttatgcctttttaaagtgtgtagattaggaatatgcaaacaaacaagcacatacatgtaccaggtagttacttactaagtagactatgtgagcactttgctttttttggtcacttaatgtttctgggagatatttcctttttgttacataagaggtgaagtcattcttttgtatgactgtgttgtttgacaaatggattcttttgattttttgacttttctttcagtcttcttttgcagtggaatacctaggagttgtgttgtatttcttcattttactcatttatttttcttgtctgtgcctcttgcactagctgagccttgattccatcatgatcgagggattccaccaaattcactatttgagaagccctgtggtgtgatgcatatcagggtatatgccccaggaaggtgagtttcataatcaacgttgctgattacaatcaatgtttcataattaatctactcaggaaataatttctgagcatctattatatgccaaacactgttctctaggctccagggacacagaagaaaagatgatatggcccctgaccccgtggagtttatggtggagcaagggagctataaagtcatgtagtaactacaaaaaaagcctggcagatgtcgtggtgggtaaatagaggaggccttaagcatatagggcagtggttatcaaacctcagtgtgtcttagtattccttggaaagcttgttaaaattcagatgactgggctgcactccccagagatttagataaagtgtgtttatgctggggcccagaagctacatttttactaagcaccacaagggattctggtgcaggctgttctgtagacctcattctgagaagtactggactaaaggttagtaaagaaaggtgggccgggtgcggtggctcacgcttgtaatcccagcactttgggatgctgaggtgggcagatcacctgaggtcaggagttcaagatcagcctggccaacatggtcaaaccccgtctctacagggtctacagaggacagcccctcctctctgaggctgtgctttgctgtgcttgtgaaggtttgtgcctcctctggccccgagtctcattcacacccacctgtctattcctgttggtaggtgagccctggctctagcttgggactcaggccccatgcatctcattttaaaacaaatgctctttgtattttgtaaaaatacaaaaattagctcaacatggtggcgggtgcctgtaatcccagctactcaggaggctgaggcaggagaatagcttgaacccaggaggcagaggttgcagtgagctgagattgagccattgtactccagcctgggcaacagagtgagactccgtctcaaataaaataaaatagaataaaggtgtattagtcagttttcacactgctataaagatactacctgagactggataatttgtaaaggaaagaggtttaactgactcacagttccgcatggccaaggaggcctcaggaaacttacagccgtggtgtaaggggaagcaggcacattttacatggtggcaggcaagagagaatgtgaaggaggggctgtccaacacataaaaccatcagattcatgagaactcactcactattatgagaaaagcatgggggaaactatccccatgatccaatctcctcccacaaggtccctccatcaacacatggggattacagggattacagtttgagatgagatttgagtggggacccagagccaaagcatatcagaagccttcctggagaaggtgagggctaagctgagatctaagaaatgaacatgaatttgccatgtaaagaaggtagcaaaagatcttctagtccattacttctcgaagtgtggcccacagactggtgtctgtctgcagactgtttatcgtcagtccccatcaagataggcacagaaattcagtgtttaaactttatgtggcaatttgacattgtaacgacaccccagcatgtgattagtggattcatcagtggactcatctatactgtctgagcttggtgtagacctgcttgggtgatgttaaattcatgagggcatcacatgtgacacaaactgcacccttgtcctgtatcaagatcacatgtatgtacaggatggattggaagttaagtccagcaaaaagtcccagtgctggttctgccccaaagacgggtttggggaatattgttctagacagaggtacaagaggacagctgctttggaggaactggaagaggtttagtgtgatatgggggcctagggtatgagaatgcaagtagtaggctgtaacctggaacagaaagtaaggcgggcaggttgccacctgattgagaaatttagaccttgtgcaagtggctatggaaatccactgagggaacttaattgatgtttttaggcacgaggcccttgtgtttagaaattcattataaccctcctgtgtagttgggtttccctgttacctgcagtctattttcaaagccaggtaagagttgaggaagtagcaagattatgaattcccctaagggtttactgtttatccagtggtttgcttgattcctccatgggcttctcccatgacggcccctcctctctgaggtggtgcttgtgagggtttgtacctcctctggctacaaaccctcattcacacccacctgtctattcctgttggtagataagccctggctctagcttgggactcaggcctcatgcatctccttttaaaacaaatgctcttagtgttttccacataccataatgctttgaaaaaaaaattcaatattttatttaaaaaatttcaaactataggaaagttagtagaataacaatataaatacgtttttacttttcatctagatccttcaaattgttatcatttggcacattggtttctctccttataacagatactgtatattatgtaatatatgtaatatataatgatataatatatgcacacttttttctgctaaatcatttgggaataaatggcagatattatgcccatttactcctaaaaacttcagcatgtatcttctaagggcaagggtattctcttacataagcacatgcactgatcacgttaaaaacatttaacattgctacaatgctatcatcagtagagtccatattctgatttgctcaattgctcccaaaatgctatcttaagcagttaattatctgacctaggatccagggtcacatatggtattagttctcttcagtcttctttattctagaatagtgtcttagccctcctttgttttttctgatactgacaattttgaacagtacaggccagtcattctgtaggatgacccccagtttgtgtttgttttctggttctttcctcctgattagattcaggttaaatagtttgacagaaaaactgtaggaatagtattgtgttcttggtgaatcatattccagggtgtacagtgccagtttgtccctttattggcaatatgcattttggctgcttggttaggtggggctttgcaactttcaagatgcaagtccctggaataagtttattgccatgattgtttccttgggtacaagggttgccttagagtatgtctttctctgggaaggcccttctttactcctttctaagagggcgggtctctgccagctctgccttaggacacatgatcaatcggtcaggtgacttctcccatctccaagagcctgtgttctagtgaggagagacaggcagtaaacatgtaaatgtaaatgatcagaataaatgagtcaattccagattatgataagtgctgtgaaggaaataaaacaaaggaatgggacagggttaggtaggggaaagttgccatccataaaaccaagttcctgccctcctggggtacccattgcaatgggggacatcaaggataacaaacatatatatagcaagtcaggtagtgctgagtgctgagtgccctgaggaggaatgaagtctgtaaggagagaggaatatcctgaaggattctacagagggggcagagaaaacgtcgttcaggaagtgacagttgagtggagaaagaaataaagcaaggacaagccctgtgagactcttgggggagagtggggcaggcagaggcacctggtgggcacagagttggaggcagcagctcttagtgcagtgaaggaaaagaaagaggctgggctggtttgggaagtgggctagagtgaggaatgggctggagtagggagtgggctagagtgaggagtgggctggaatagggagtgggctggagtgaggagtgggcaggagtgggtagtgggctggagtgaggagtgggcaggagtggggagtgggctggagtgaggagtgggcaggagtggggagtgggctggagtggggagtggggagtgggctggagttgggagtggggagtgggctggagtggggagtggagagtgagttggagtggggaaccaaggtggggccagggccagaccctggaggcttttcagacctttttcaatggtaacgacattggcttttatattcatatagagtttgggaaaccgttggggtgttgagagcagggagaggcatcatccacgttttaaaagtatcagctaggccactttgtagagaaattgatgaggtgggaaggattgggtccaaggtcaaagtcaggcatctaattccatttcaaatcctaagtttcgggatgtatgggaaaaagagacacgggagagggagagaagtggcctcttgagatccagaacaccagaccagggagaggccagcaggctctgtctcagataaggggcaatttctgtggtcagccaaagccgcatttgaatctcaaagcagaaaacccagtatctggaagaaaaacgaagggggctccatgggaaccgtgaccttgttctgttcacctgtgcctccccaatgcccactaagggatgctcaacaaataaatagatggatggatggctgaatgaatgatgcaacacattagcttctattattattaatgttcaagtatggaaacccatctcctgagggtgaatttgcaccatgtcaatttagctaaagtgggactacgtttcccggagtttgctttcttctctatcccctgctgggagttgcctgcaagagaaatgtgcacgtgacttagaagagggaagtgaggagccggcagtttgaagcatctgggggtcagcatggaaccaacatgttcgcagctgccgcaagctgtggcaggtcagcaggctcatcttcttggcgctgggcagtggctccgttcctggctcctgaagcccctgttgaccaactccttctggtcttcaaatcctggtccaggcagatgtgtaactgcatggtgaggaggctccaccgctcatgcaggtcacatgcgtggttgagatcagagaccacgagaaaagtcacagctgcagtgtatcacgaaggtttcatgctgttctttagccttcctacttcatgcccatcttctcgacagccggttctgctgacttcagctgacttcaggagcggctcccacagtcatacaaaacctaatctcataaaataccccttcaaactcactcatcctggtcctgcttccctgaccaaatcctgaggatgagactggatttaagtatttctcaaccttggagcttcttgggctttgctattgcaaatgttaagtaagaatattaattttaaaggcatgtttatcaaaataactgatcaactcagctattttaataccagcgattctcacctaaacatacggaattgttttcaaatgggtgaatatgtttctcttcaagttttatagatgtttggtaagaaagcaagtttttcttttttaaattgtttgcctaagagggatataaggaaatgtctgtgttcgattttgcaatatgtgtgcgaaatgactttgcagtgagtcgtggaggtgatgaagttcagctggcaatcattggcagaccccgccgcccccccgccacccccactacacacacacacacacacacacacacacacacacacacacacacagttcccctgcttgggagctgtgacctttaactgagttcctgagattaaagtttagtcctagtttgaggctagacctaaaagattttaatttttcagatatatgggggaaagagacctgaaagaaggagagagaggctgggctcagtggctcttgcctgtaatcccagcactttgggaggccaaggtggaaggattgcttgagcccaggggttcgagaccagcccggccaacatggtgaaaccctgtctctactaaaaacacaaaaattagccatgtgtggtggcacatgcctgtaatcccagctactcgggaggctgaggcaggagaatcacttgaactggggagggagaggttgtagggagccaagatgacaccactacactcaacctgggcgacagagcaagactctgtctctaaaataaaataaaataaaaggagagaagtggctgcttgagatcctgaccattggaacagggcggggaggcccctgggttttgtaacagctaaggcacaagctctgtgaccagccaaagctggatttgaatctcaatcatgctgtgtaaccagaagcaattgatgctgcatcttcaagtcttgatgtcctggtttagaatgtgggtgataatcatttctccatgtttgcaaaggtcaaataggactgtataccaaggactcggcacagcatctggtgcccagtgcagcagacaagggatgcctgactttgaccttgctaggtgacctgttaaataatttttctgtgcctcagtttcctcatctgtaaaatggggcctactaatagtatccacttgataacattttcatgaacatgaaatgaataaatggtgtggttaggatggcaaacactagattcaaatcctggctccaacacttaattgctgtgtgacctggagaaaattacttaacatttctgaatctcagtttctgacctacataaaatgagtctggtaataacagttaccatagggctgttgtaggagttaaacgccagcatgtatgcaaagcagttagcagagcctagtgcatagaaagtgcacgttgtgcacatgtaccctagaagttaaagtataataaaaaaaagaaagtgctcagtaaatactgtttattagtattgctgtccttatcatgataattaaccagattcaaagatctgagcgaagggcattgcaggcctaattgtctttaactcatacaaccattcttctgggtaaggatgacaccattcccattttatggagaagccactggaaggttgatagtaggtgtcatgttcatctctctgactggggagctgagctcctaaccacttcaccttactgcctctaggttatttttttgtttccttttctttttttctttttttttttgacagagtctagctctgtctcccaggctggagtgcagtggtgtgatctcggctcactgcaacctctgcctcctgggttcaagccattctcctgcctcagcctcctgagtagctgggattacaggttgcaccatcacaccaggctaatttttatataggttattttttctaagagtacctcctgaggattgaatgaatggagcagcccacttcctctgggatcactgtttctctcactccagggtttgatacacacagggcagcctggggtttgagtgcctgcattgctattgggtgtcatcttttaggacacatttgaaagccaccccctgacacatgggtaactatgtgaggtgattagtgtgtgaattaggttgattgtggtaatcattctcaacatatacatatgttaaaacagcacaccttcaatattcctatttgtcaatcacaccacagtatagctggaaaagaaagcaaagaaggaatagggtgatctctttgtgttgcaagtgatggtggggggaatggtgggtgggtggcgggggggactctgactgatcttcccgatcccctcagtttcgttactctgttgacagtgggaattctgaggggcttctcaagggaaaaacataaaacctgacctttgtgtaattctaaagcaagaccttaatgaaaacttgcttttaataatgaagaatgacagtatcaaaagtcaggaagcttctccatagacgttgcaactaaaatatatatcagtgaagatgcttgttgctaataggcgggaacacaaaacaaaatctaatgtacagaatgaatttcctctttggactcctggcgagtgaaaggtaagtagatgctagaggcattgagctctgtcgattgcttaggccgcatatttcaggactgacatgtattagctcagtgcttctccacaaggacaattctacccccaatcccagcaaaagatgtgtgtcaatgtttggagacctttttggtgtcacactgagaaatactactgtcatctagtagataggggtcggggaggctgataaacattctacaatgcataggacagcctcccacaacaatagcgaaaatctgatccataatattatagtgccaaggttgaaaagccctgagttagaaagatgttaggcagttgtcatcaaatattaacagctaaagaaaagttttttgtgtttggacatgtgtcttagctagggttgccataacaagacactacccattgggtggcttaaacaataggcatttatttttatcatcgctctggaaactggaaatgtgagaccaggtaccagcatggttgggagagggataacttcctggctggcagatgactgtcttcttgctatgtggcagggagagagagagcaagcgagcaaaagggaacatgatgtcttttcttaccaaggcactaatgtcatgagggcctcaccctaacaatttcatctaaccctaattaactcctaacagccacatctttaaataccaccatattgagggttgggacttcaacatataaattgtgggggaggtgctaacacaatcattcattccatacaaatgtaactaataaggttaaacatgtatgtagcatttactcttctaagcgctttacatgtatatgaactgatctaatccttgaacaagtctaaaaggagacaatgactttatcctcattttacagatgaggagattaagtaacttgtccaaggtcactttggttggggatgcagagcctggtttccaacccaggcagtctggctctagggcctgtgttcttaaacttgatgtgaagagtaattgacatactccatccgttgaaacttcctccagttaaaacaaataagaaattatatgtaatgactgcattggcgtaaagaaaaatacaggttggattcattatgacgtattcattatcattattatatttctttttccttctgattttaaaataaattgaaataaaaacatttttgtggtcctgggtcctgacactattcctaatggagaagtcagccttggtggcagtgggtgctgtcaggaacatgatggattgaagaaagtcaggtgtgaaaatgatgggagtttcagcagcctgggaagctgcgcccctgctctggggacagcagttgttcagctccagcccactgctaagaagtggagggaggtcagagaatgagggcttagtattgacaaactggcaaatgttccaattttagagaagaagccaagaatccaaatacaagtgttcttttgagtcaattcagtttctacaaacactattatgaaagaaagaaagaagaaagaaagaaagagagagaggagaggagagggagagagagggagggagggaaggaaggaaagaggaaggaaggaaggaaagaaggaaggaaggaaaaaaagtaacaaaaagggaggaaggcagggagaagaaggacaaagcatcacatttggtaaaggaaatgggctttggggtcagatatgccttggctggtctacttgctaggcatgtaccttgggcaacagatttcgtttctctaaatctcattttatcatctgtaaaatgggaataatactagaatgcacgtttaccaccaggatgtgggtactgaatgcgaattagatttgcatctcattgttaaagtgcggtggcatttcaaacccaaacgggaacttgcagatcagattccagtgctttctggagctagaaaaatggtatatatgggcaaacgagccaggtggggcctgtggcagactggagagctcagacccatctcaaggggaagctgcttggccaattcttgccatctggggatgtggcccatgtcagacacatctcccattttaaacagtagttaggaatctggattgtttgtgaaatgtctcatttatgtttttaatcttagtaatagattccaatttttgaaactacaaactggggctgaatgatacatgcctgtaaactggacaaggcccaggtggtcaccagttcatggcctgctctgaacagaaggcgagtgtctagacagtgtcttcctgtcttataggtgccctggtggcatctgtagacatatctgtagtccaacagggctaagttcttacagatcaggttagaatattaatttagtgatatagctcatataagaaaataagaattttttaatcagttgggtcctggacatcgtgactggcaatgtcagtctggaaaccgaagatgtcaccaggaagaaaggacaaagatgtgtgagggatggagcagggaatagactgattttttttttttatggaaaagaataaaagaggatgaaatagaagaacaaaagattcagacatgcaaatcatagtattctagagaaatttctaggcccagaaatcatgaggaaaataatgttagtttctttttccaccctttccaatgagatttttcatgagggtaggaaagtacttctcttatagaattttacagctgaatagaactaaagagacctttagttttcaagttaaaacatttttttttaaagtaaataaaataagaactgcagtgaagaaatgactggtccatagccatggcacatatgaaaattccaaatgtgtatgaggtaaagctagggctttgcatgagtgagatagaccaggtgggaggttctacggaatggtggaaacaggcaaacaagccaagggtctggcccgtccaagggggctttgttactcagctgtagccagctgtgctaagcagaaagtgggcccaccatagacagatctaactttttttttttttttttgggatggagtctcactctgatgcccatgctggagtacactggtgtgatcttggctcactgcactctccatctaccaggttcaaacaattcttctgcctcagcctcccaagtagctgagaatacaggtgcgcaccaccacgcccagctaatttttgtatttttagtagagacggggtttcaccatgttggccaggctggtctcaaactccggaccttaggtgatccacccacctgggcctccctaagtgctgggattacaggcatgagccactgcgcccgactggcaacaggtctaacttttgaaggcaagagaaaaatatcaactttgagaatgcactccctcaatttttaaaagttgtcaacaaattcaaaagtttaaaacacatcatgcaagccaaaaaagcccatgtgaggtccacatttggctgggaacctgccagtctgtgacttgcattaaagaatcttccagcatcccacacattttctgacaaggtagttctcacctcacttcctgtcaatgtttacctaagtaaggaatgcttagtgtgatcattttcttaactctttatcctgaagaaggaccttcagtaaagacaatattttaatattttacttcggtttcctatattttactttggttgcctccattattcaccaatttgtgcttgttcagccagaaattcaggaaccacaggaaagctgttgactaaagaaaaccttaaactttcatcccagttctgttcactgttttttattaaagagttttctttttatagtaaactaaagagaggatgttcagagtccaggttcatgagctgcagggctttttttttttttttttttttttttgctcagcagaaccccaaaaatagaattgcaaaaatacaatttggtaaatctttaatgcccaaatactactccttcccctaactaagtcagccactggaaccatttctgcctctgcacatgacactgaccaggaggctaagcccattatttatgcacggctgattttatttctcaattcattttgagcatctttaatgcaaaacaacaagaaaaacagcagcaaaacacccagcctgattataagccttttctcctgacttttaatgcaaacttgaagaatgagccagagatgactcataaactcatgaacttcagtttctggtgaagaccatcatttaagacaaagtcagttccccagactgtgggtttccctatttagtgaacaaacatgtttactttaaaatgctaatcaaaaaagtccttgaacagacattgtcttccccaaaattactaaaatagttaccatgtttcaaattatttagaataggaaactaaattataataaaataattgaggatagaaatctaactgatttttcacctattaaaatttgggtcacaaattatacacacacatatacacacacacgcacctacacacacatgcatacacatctccaaaacacaagatagtaagcacgggaaaatttgccaaatgtcctagtggattgatcaacaaacagcccaggtaattctgcatttcttcttggtcgaagtcactttttcttcccaacttctcactcagactaggtacaactaaaatgtagataagtaagtcactttatctgtgttttatttaagcagtacggtggttaggtgcatgaatgctacagccagcatgcctggttcggattcctggttatgccactgttattggtagcttaatgtggagttggtaagacggggatgtggaaatagcagtgtcaattcgtaacttgcttaggaggattaaatgaatgtatagaacattgcctggccctgtgtacaaattcaagactttgagctcagttagtctggagagctagcagattcttaacctttgaatccccagctaaaaaccctgtcctgacgaacgttcatgcacattttgacggcctttcagagatgctcaggccttctctgcctcccttactccccaggctaaggtcctctactctagaaaacacctaaaggaacctggggatgtgagttacatatgaaaaccactttagtcctcctaaggacaccatacatattttctgagccatggcaaaatcaataggtaaacaggtattgttagagggaactaggcctggttcctttttcaatggggtttgaaagttgtattttgtttattaggaaggaaagaagtggacctttccagtgggtgattcatcatctggttccttcaggggaagagagggagtgactagagaggattgatgtccagcctggggcctgctttgctcaacagggacctcatgaaggcaggcttcttcctcctgacatttccagcactcctcacgggcactctggagagggatctctgaatcatcgctgtgtctagacacatcaaagggcaagctgcctgtttctcaggctcaccaaacccagtcaggagcactaacgtggcaggtctccctctgaatcactcagaccagagggagggcgctgagaggtgagcaggttcacccggctgtattcgctcttgggcgagggcaacattcctccctggggaatgcaaagtcatgttgcctcttgccaaagccagtcaggtaaggagacactgttgattttgtctctgcttcctggtgccagagcagaccaagcagggctttgaagatgttgattagacgtaagccttgacgaggaatgtgactgtcattcaacagtgtaggcactcagtaaatacccggggcatgaattcaagggaacgctaccttgcaaaatgggccactcacttcagacaagtaattgaaagaaacatttaaaaattccaagagcaggaaagataaaataattgctttgggttgctcttcggaagcctaatgcaacatacagttaagttttagacttcctgactattcttcacaaatttcttttcttcaaactcatgttgttcttatatctgaatgttctactgcatactctaatagatttgatttcaaccacatcccacacaaaatcatatttacacacacacacacacatacatatacacatatgtatatgtatgcagttgattatggacatagttttctgctttgcagatactttattaaacatctattatatgtgatattgatatttccttttcacatgttagaaatattttgttttccggtctcaaccattttttttttttgaaacggagtcttgctctgtcacccaggctggagtgcagtggcacgatctcggctcactgcagcctctgtctcccgggttgaagcgattctcctgcctcagtctcccaagtagctagtattacaggtgcccgcttggctaatttttttattttatttttattagagatggagtttcatcgtgttggccaggctggttttgaactcctgacctcaagtgatccgcccacctcggcctcccaaagtgctaggattacaggcgtgagccaccccgccaggccaggtcttaaccatttttgtaggccctgtgaaattctgatcctgaattaaatagccctaagattgtagaaatgaataacctttaatggagtgtatgctttttatggcctcatcaataaatgaatttattcctgacgttcttctaaggctaatcactccaaaggatttcagagtttatctacttgaggttatttacttgatacattgaggtggttccatcctgtaactggttaagtggatagtgtactgtttggggctgttgaagggaggaatgtagctttcattttctaagcaccgcaagagaaatggagaggaggtcctgtgtgtgccctgagatcccgaaaggggaattatgaactgcgaggagcatgtgcttcaaatcgtttgcaaatttgggccaatgagatgctctttaaaatgtcatcctcaaaagagggcatcccattcatgggtctctgtatgagcagccctaaaaagcaaagagccagcatggtagctcctgcctgtaatcccagcacttgacgaggctgaggtgggaggatcgcttgagcccaggagttcaaggccagcatgggcaacatagtgagaccccatctctacacaaaacttaaaaattagcagggcatggtggagtgcacctgtagtcccagctaccttaggaggctgaggcaggaggctcccttgagcccaggaggtcgaggctgcagtgagctgtgattgtgccgctgcactccagcctgggcaacacagcaagaccttgtctcaaagaaaaagagcagactttcatttctaattggaacaaaagcccctctaaaggcgctgacagctccttgtaggactcctggttgggtgatgttggaagaccagcattctcctgaggcaggaactgtgtctgcttttctgtccatattacactccccacaataagcacagtgcacggcacatagtaggtgctcaataaatccttttatttaccacttgtctggagtaaagcattataatgtagtcattacacgtgtggcttcggagcctgactgctggggtctgagccccagctctgccacttacctactgtgtatctttgggtaggttacttctgcctctgtcttggtttcctcatctgtaaaagggggataatgaaagtacctacttcagtggatgattacacttccttcacatgcatttacgagttttctgaacatataatcctgttgagatccatgtggacttgatgattctaattatttgtcatgcattacactcttcatgcttttggagttagaatgtatatatatatttataataattttattttcttcttaataaatagtgcggacatttggatcaaggaaaaggagtgtgtgtgtgtgtgtgtgtgtgtgtataatttttaaaaattgctggtaagatgtgtcaagctaagatttaacaatctgtgatctgcacatctttagtttgaggaaacaagtcacgttttatttcattttaattttaatttaatttaatttaattttattattattatttttttgagatggagttttgctgttgttgcccaggctggagtgcagtggcaccatctcggctcaccacaacctccgcctcttgggttcaagcaattatcctgcctcagcctcccaagtagctggcattacaggcacgcgctaccacacctgactgctttcgtatttttagtagagacggggtttctccatgttggtcaggctgtctcgaactcccgacctcaggtgattcgcccaccttggcctcccaaagtgttgggattacaggtgtgagccaccgcgcctgacccacattttattttttaaaatgtgaaaccgtatcttggtcatgtctttagcagcatggaattttggaaagatgatgacatttgaggaaaggaggtgaaggaagagacttgagtttaaactggcaccttctaatttctctgcccccaaaaaggtattgatatatgtgttttaattgttgccaatatgtgtctgaaggttgaagaacactcagagaaaaaaatgaaaaaaacacatgtgtttaaagtggtccataactaaaaaaaaaaaaaaaaaaaaaaaggtggtccataactgaaagcagcctggaaatggtcatggaggtcatggaggtagtgctctggggtgcatttcactaagggctacatcatcccttgaggtttgcaaagctggtagctaaggaggatgaggtaatgcagggatgttcatctggcacatttcatctcaagagctgatcatctttaggtcgggaatgaattcctcaccccatatagaatattacagagttggctcaggtggacagagaggagagggcaaagaaattttgatgttctcaaggccaggaatgttgcccttatatgggtttccttggaggagtcggctgtgtgtgcagcttgttccttacttgaggtgtatcaagacgttcaccacaatattcagtaattaattatcccaatccacatttaggaaacagcagaggacactgtgacattatctaacaatctctcaggtcactgcagatgaaactagctttgggacataggcctcaaagattcctgtgtgtagcagtagctcattagcccttttcaagagaaatattattactgtcaaatcagaagcttttgaagccttttggtgctattctgtctaacacataaaagtcttctacccagggaggcatagtatttggtttgtacagaactgtttctcaaagtagttacttcatttgccttcaaatttctcctctattttcaccaccacttaactgttggccaattggattttttttaagtttctttttttttttttagtttcttttttttttttttaaattgtcttccttaaaattaccagcatggaaaaataaactattcccaaatgcgtgatgctgtgaatctgagagttcaaatgcagcattagtggaggttgtggttgatgggcaagtagctcatatgtcttgggataaaatgctcctaagaaggaattttggccccattcacaggaggacacttttttcctcattttggctttttttttttttttcccccggcctggacacaaagtccctagtaattttatcacaactcattttgggaatggtgattcctgggccataattgatttcaggagttggtaactgggctgcaaatcaaacacgtgggagaaaatatcttaccagtattgtcgaagccctttggtttatgtgctttggtaataaaatcctcagcaggggagttcaacaccatcttttggtttctgtttctaggtttcttctttcttgcttgaggaatgggttagtatgtgggtttgtgcaggagattcagagagagggcctaagattccgcttaggcttcatggggttcacatctttcgatttggggcctatttgatggctttgctttattttaaagtgttttttgtttcataaaacttatttctttcttcttagaggtcatttgtagagattgcattaaggcttacagttttgttgtctggtagaatgctttgtcttctttttaaaaaaggaactggcctgctagcttggcattagtgtgtaatgatgacatcatttatttgtctctataggaaataggcattcattcctttttttttttttttcccagaggggaatgagttcatgttgagagtatatgataggatgtattctccctggttatcataagcggacgcattttttcatttacttggaagatctttctgaaacataacctgtgcaaaggactagggttatgggagaaattataacagacaaggctgctgttctacagaagcccttcgtctagtggtagtgggggcacagatgagcacacaggaaaatgcagaaagataaatgctaaagaaggaggccttacccaaccttgggtctcagggagacctcagggagggagtgacagctaaggggagatcggaggggtgagtaggagcgggacaggtaaagacggggtgggagagttaggaatttctgataggagagaacaccccacagagaaggaattgcaagttccaagtccaggaaagagaactttaattacatttttcaaagtacttatacatatgttatgtttatttattttgtaaccttgagttatacaactcagagtctcagttttcttatctgaaagatgggataactatccccatctccaggggagaccgtcaggaaaatccgagataactgacagagcgttcctcgttagctcacagctgtttacgagtgtctggcacacagtctatgcttcataaaagaaactgcctttactgttgttcttacattcttcttctctatcttaatgtttccctttgcctaatttgtcctacctatttttaaattatttaattttgcttgaagtatttctctctctatcttttttttaattgtagtaagaacatttaacctcagatctattattttaacatttttttaaacttttattttaggttcggggtacatacgcaggtttgctatataggtaaattcaccttatggggggttaatttcacagattatttagtcacccaggtattaagcttagtacccattagtgatttttcctgatcctctctctcctcccactcttcaccctcaggtaggccccagtgtcggttgttcccttctttgtatccatgagttctcatcatttagttcccatttataagtgggaaacatgcggtatttggtattctgttcctgtgttagtttgctaaggataatagcctccagctccacccatgttcctgcaaaagacatgatcttgctctttttcatggctgcatagtattccatggtgtatacgtaccacattttctttacccagtctagattttaacagatttttaagtgtacaatacattattatctatggatactatgttgaacagtggcagctctctggaactcatcttgcataactgaaactttattcctgctcaatagtagctccctgttttcctctccctgtagtctctggcaaccccccttttactatctgatccttagaagtcctcctcacacaccgtataggggcaggatatagtttcctaccccttcttaagacaatcacaggcaagagcactgtcacttacatgaccggttaagagtaagtagtgtataccctgtacacattgtgacagcagaaggcggggagattgaaagaattcagtaacacaggggttctgccagcacagaacagtgtccactatgatcttttttaacccaaatgcagcattatgcggagtttctctttattttaaagtgaaaactgtgatgtgactagtcacacctgacttcagcgcaccatctaatgagagcctctgtgtcagaatgaattgagctataataactactaaattgactcataaggacttacaccaaaaggagatctatcatcctacagaattagaaatgcagagggaggatggccctgaggatggttaatttagcagaaaccaacatcactaaagattcaggaaagttccatcctctttttccattttgatatcattgaagccgggagttcactttgtgtcttcgttttaaaaaccaggagaaccccagagccctaagaacaccttccctcacaattcactgaccagactcaaatcatatgcctcctactgaatgaagaggaataaaattatcagggatggccaaggctttaagcaagacacgaactctaaggatgccgatggtctgtacctactatgagaacctgatatctgaagttaggattccactggtaagaagaaaaagggattgggcaatggctagtgggatacacttatcatatctacctgatacacattttctttatatttatttgtgcaaaaagaaaaacaaattctctcccctttctgcttagaccagggaggtccaaggtatttggaaagaggagaggttatgccaagtaaaaacaagcccacaaacctccctaggagagacacacgcataccttccacatccggatcagggtgctgatgatgatggtgatggtgagtggaaaatctcaagttccccacatctgccaaagttggagcagctgctactaggagggcaccagatggtaggtccttgcttcctgtactgctcagagtcccagcagaaaacagaattccattcagatgtttgaccagagacttttttctttccttttgaaattatactttcagttctgggatgcatgtgcagaacatgcaagtttgttacataggtatacacgtgccatggtggtttgctgcactcatcaacccgtcatctacattaggtatttctcctaatgctatccctcccctaaccccccaacccccggacaggccccggtgtgtgatgttcccctccctgtgtccacgtgttctcactgttcaacccccacttatgagtgagaatatgaggtgtttggttttctgttcctgttttcatttgctgagaatgatggtttctagtttcatccatgtccctgcaaaggacatgaactcatccttttttatggctgcatagtattccgtgaagtatatgtgacacatttcctttgtccagtctatcattgatgggcatttgggttgtttccaagtctttcctattgtgaatagtgctgcaatgaacatacatgtgcatatgtctttatactagaaggatttataatcctttgggtacatacccagtaatgggattgctgggtcaaatggtatttctggttctagatccttgaggagaaccagagattttttttagttactatttctaaaggcatgggtaggttaagaaaactagcaagggaggatgagacacccaagactaaccaccgtgcgaagtcataaggaaagcttagcctgaagggccaagaagatgaaataatttttgcagatgctaagtgaaactgaggcagtgaaggaggggcctttgggaggagctgtagcctagaggaaggaagccagtgccagacacgtggccagagaggccatagaggcagggctctgatctctctcacttctcagcctctgatatccagctggtgcctgcttccattggctgagcccaaatgtaggcactggcaaaggagctggagcccagtgatgcccatgtggaaggcagcctctcggggctagaggagggcagagacggatctagttgggaggacaaacagatggatgggctgatgtgatcccagacacgctcctccaactagggcattctttctcaagagcctcgattccaggcagagccacatggcgtctcagagtcagtgaatccacccgcagtcagcaaaggagcgcctttggctttgttttgcttctgcatggcttgtcttttattcttctgctcagcacttctccttctcctcattttcctctctcctgcttttctcttctttgtcttctgtcttcttctttgtcttctgctcagtatctctctgattcttgaagcctttctcagcctaataagggccctaaacttccactggaatcatggagagctcttttctgtccttttttattttttagtgaataagagtcagattcaggtaggacaggtttaattttgaaacttgaaaaattgctcaggacttcctcttcaggatatgagcattggtcttaaatatcaaaagaaaacaagatttttggtagggttcttttagataaatgcttactacttacaacatataggaagaggaaaaaaaaaacaaaaaagtgataaacattataaatagtgtatttcttcacttcctttaaccatcatttgcatatttgtgcccagtgtccaatactaagtgttgctttcaccactcaagtgactcttgggacctgtcctgagagctgtggtttcaggctggatgcaatgaagtctttccaattgttatacaattgactgtgagctacttaaatctgccacttattaagaatgactggttatgaatcatcccagttcccaaatatgatgatgaatttgtgattactctgcaacagttttcaaaacaagatctcatacctttcatcaggaagagggaaaatggtttcattttcaacacaggaatttgtttccctggttgagacataaaacatgtgtcttaatggttctgcaatgtgctgggatttactctgaaaggatagtgattcacgaagagatggagtcgggtttcacatcctttgaagtctagggttgcccaattgcagtcatggagcaacatgcagctgagaataagagccaactgttcctgagtttgtctttaacggttaaacatgcctcatgtggtgtgtcaaaagcttataaattcataattggggcaaggctgctgtgggtttagttgccaataatgtgttgatgttgggttcagagtgcccaattaggatggaacataaagcaatgcatggcaacgaatgaatatgagatcactcatgtttcagtggaattttctttgaagatccacaaaactggagaaatggctgcccggataacgctgacatcaccatgtggccatattcagagggctgaagaagtcctgacaaactaaagtggggtgcttctgaagttccctaaataggattggataaagtgtagggatagagagatggtcacatgcaggattccttcccacctccttcctgtcatatcagaatacttgttactgtggctgaagtgacatttccatccagaagccaggatctggtttagctgtgcttgtcttccttcccggagctgagtcatgaatggcagtttgggatcctccaaagtgaaaggtgtcttttgttcagccactcgaggctgctctctcactgtgctcagttacagtttaactggcatttccttgtcagtactctgtgctgttgtgtaaagcagattcaagctattctatttgcttcttcttatttgtccactcacacagtcactatttatgatgatccttctatgatgaaggcactatttgagatgcctgaaaacacaaaagtgagcaagataaacgaggtcctttttctattctattcttgttgaggagctagataagtaggcaaatggacaaactaataaaataattttagacagtgctatgggatatgaaggggctaagaagggatgatggtgtaacataatttgtgagagttgcgcgatggccacattagatgaggtggttctctctgaatatgtgaattttatcctgagatctaaagaataagaaagagtcagcaatggaatgatctagaggaagagtgttctgggtaaaggactcacaattggaagagtcctcaggcagggaagagtgttctgggtaaaggactcacaattggaagaagtcctcaggcagggaagagcttggtttattaaagaaacaacaagaacatcaacagaatctgtgtggctctgctccatgagaaagagggtgggggataggggactatgtcagaaagcaatgggagctggttatgcgggccatggtgagaagttgggatcttgttcaatcataatccacccaactgtgttttcactccctatacttccactcttccctccctatactttctctcttccctccttatccatctccttatccatggtttatcactaaaatcactcccttgaaaatatcctgtcctttggtatgagttatctattgctgtgtaacaaattaaacaaaaaatttagcagtttaaaataagaagaatttgttatctcacacagcatttgtagatcaagaaaccaggctggcttagttgggtgattctgcctgtaggtatctcatgagtatagttatctaaagatcatactggggctgggggggttcacttccaggttgactcactcacatgcctggagagttagccctggtttttggcagggagccttagttccttgtcatgtgggtctttccataggacttgttgagtgtcctcatggtatggtggctgactttgcccagagacagtgagccaagaaaagggaaggtgaaagtcactatgtcttttaggatctagttttgaaagtcatatatcattgtcttcataatatctaagtagtcctaaaggctatccatactcagtgtgggagaggagaaaatcacacaagggcatgaataccagaagacaaggaccatggcaggtcatctcggaggcttgctaacacaccctatcaccctcctttgttcaaatcttgcaaaacctcagccctgagaaatctaaagcatggcgctaacatctaacccattgaaaagcataccaacatgctgagtgaactcattttaagttcatgaccacagacatcaaatgaaaccttagtgctgtctgactatccttctacatgcctctaggcaatttattcttttcctagggtgactttcccatatcttcatctcttttatacctggtctcattcttggccaaagtaaaatagaagctatcagaagaacaattctacatacttccaccaacaaattaccaacccagctatacccatatactctaccttctcacctgtcactacagatggtcagcttttgcttctatgtatgtgttttaatgtattagtccattttcacactgctgataaagacatacctgagactgggaagagaaagaggttcaatggacccagcagttccacatggctggggaggcctcacaatcatggcggaaggcaatgaggagcaagtcacatcttatgtggatggcagcaggcaaagagagagagcttgtgcggggaaactcccgtttttaaaaccatcagatctcatgagacttattcactattgcaggaatagcacgagaaagacctgcccccataattcaattacttcccactggtttcctcccacaacatggaggaattgtgggagttataattcaaggtgagatttgggtggggacatagtcaaatcatatcaattactttcatggggctgccataactaaatactgcaaactggatggcttagatcaacataaatgtactgtttcccagttctggagggtacaagtctaaaatcaaggtgtcagtagggctatactccctctaaacacgctagggcaggatctgttcaggtcttttttctgttttttggtggcttaggcattaactgtcttgcaaatggccatcttctccctgtgctcatcccatagtcttccctgtatgtgcgtctgtcctggtatccagatttctccttttataaggactctgatcgtattggattaggacttaccccagtgacctccttttaacttgattacatctgtaaagtctgtatttccagataaggtcacattctgtgggactggaggttaagacctcaacattttttgtaagggggaaggtagatgggggacacaattcaacccaaaagcttagactaatttcccatttgtatgctgaatcccattcctttccaccagccaaatggatctttcggcaattgtacctgtttccccctgcattatctatttttccctttctattgatcattcccatcatatagaagcaggatctaataacccccatcataaaagctaaccaaccaatcaaagaaacaaaaaacttgctgatcccacttatcttatttacagaactcaaaagaattgtctttactctatggctctactccttcccctttgctttctctgaagctcacttcaataaggctttaacctaccatgccatcaacatctctttggttatggccaaaagcactctatatattatcaaattcaatgggcagctctcaagtcttgtcttacttgacctgtcaactgtgtcatttgacacagtaggccactccttcctttttgaacccatttcttcacttaatttgaggacagcactctcttttgcttcatctcccatctcactggccattgcttctcagggtttagtctttgaaactcgtctctagatgctccatgccttgagtgatgtcacccagccttgcggctgtataccatccatatctacatacactaacaattcctgacctctttctttaatgccaggcttgtatattatgttaatccttcctctctactcaaatgcctgatagacttctcaatattttatgccctaaactgacctcatgatgatccttcgtgcatatcctagttcttttcttgtcttccctgtctcagaaaatggcaaattcatgatcctagttgcttaagctaaacccttggcatcatccttaattatctgtctctttttctcatgtctcacatacaagtatcaatgaatcctctttgctctacttccccaatacatcccaaattcaggcatctatcaccatcttcatcattgtcaatctggagcaagccttgattcaccttcgcctggactattataatcatcccccagttagtttccctatctctattcttgcccacctctagtccattccggacccagcaaccagaacatgtaactcaaaatccaccaatagcttcccttcttgataagcataaaatgccagctcatttcgttggccttcaaagctccccatgagtgcattcttggccacctctgacagaatcctgtaccacttattcctgtattccctccactccagtcacgcgagcatcctggttccttttttaccctgccaactgtgctttctgcctcatggcctttgcattcactgttcctttaatgaggaatgcccttcttttaggtatccacatggtttgctccctcatttcatccaggtttctgcccaaatgtctccttgtcagagaggactttcctgcccactctagctaaaatagcaatccctgtccaccaatattctccatttccttacccactttctatttcttcataacgcttatcacggctaggaacattttatatttatttgtttttttcccttacctctttaaagtataaacttcaagagagccacgactttgtttactgatgaacacttccttagctcctagcatggtatacagcacatagtaagtgttgagcaaatatttctttgtcagttaatgtgttaactccctgtttctctctccttctttctcttccattttcattctcttccttcctatccatttttactttttctctttctttttcttcacattccacttccatcttcatttttgcttcattttcagtttaatatcagaaaaacagattgattcaaagactttcaaaaggagaaaattcaatgtaatccttaaaattgttatgaaaattgttataaaaatcaaagcagaaccacccataatttggtggttaattttcaaaataaaaagcagctgaaattttagggctaattgcaaaaatgaataactagattaatccatccctgcattgttttaacctgagtttctaagacactgacttttcaaataagctaatataaaagaggggctccaaaaatttacccatacctatgacagaaagtagcttgcctttctgtgtattatttatgctacatggattaaaaattttataataaacttcttagtaaagaaagaaaatatctcatttttcctctacacttttgacttcttcttcttttttttttttttaaaaaaaattcccatctgctttaatgtttttctttggttaatattttgggatttgttcaacaaacttacttcttaataatgcttgattaagccttgtttgcaaaatcaaatatctacagatgtgggcaagaaacacaatcaagtaggctcagggtaaaaaaaaatgtctacagtttaggggcctgtgacaaactggagacacatgctttgtgtaaagggaatactatgaaagtcaaaacaaatatgggtgcagtacaaatttagctggtagttttttgacctctgacttaggtgactattataataatctggtagctgctagtccttatattcctagtagctaactgtgggaggaagtgcatggtatcgaagttacaaaacaaatattagagtagggaaaatcaaacttctatgaaaaataagtcagcaagtgaatacgtaaaattgagtgggtatgtatgtgtatgtgtgtgtgcatcttcaaaataatagtcaattattatgcagtgatgtactgtggctctctggaaacataagaaccacatacaaaatataatgggatgaatcacaaagtcggttgcaggtagacatatgcttgggtacaattatttttagggtattttctgcaaataatggaagttaaaaggagaaatctaatcaaaaccagaatcagcttccagacagccaacccatctcagatgtgagaactttttgttagctggttataccatgccttccactccgtggtgagatgatgaagatgcccctgggtgaactgcaccctggttttcttccgtttcgtatacttcgttcttgctttgtgcatacctgaaatccatgcagactggaacgcactgtgcacagttgtgtggtgactgacgcctgaccgcttcatcatgtgtcttagttcatctgggctgctgtaacaaaacgccttagattaggtcatttgtatataaccaagatttattgcttatagcttaggagtctggggagtccaagatcaaggcaccaacaaatccagtgtccgctgagagcttgttccctgcttcaaagatgccctcacatagtgacgggggcaagggagcccccttgggcttccttccataagggcactaatcccattcatgaggggttatgactcatgactgaatcacttcccaaaagtcccatctattaacactgtcacattgggtattaggctccaacatatgaattttgggggaaaccaacattgagaccacagcgccatggagctgtgctaagtgagagagcggttcctgtatgcgggggttttcgttaatgcagtaccatttaaagtgaggattgcttgtatcagtaaatcaagacagcttgtttttccatacctttgaactcaaacttacctaatgtttgctactttgatgtttgtttgtttgttttcagatactcatttagggacataaatcatcatagttgtaagcccgtgctccagggtcaaaaagaatattgggttcaaagaccaggtctgcctcttattgcctctgtgacctgtgagacgtttcttaacctctctaagcctctgtctcctcatctcaaaaatggagataatcatacctcacagctttgattaatgtgaagattaaagtgagatgctgcttataaaaaacttagccataataggtagcataacaattctcagtatatattatcaatgactccctttgctattactccttttattagtaatacagagcacagctactccttgaagtgtttcataaagtttggtgacactcttaacactcctgagaggtcaagcatacaattggcttaggttggaggaacagtgaacttggtggtcttgttgagccctggtcatgcataactaggatgccagatgcttcgacctgtaataaaaaattccccttgagcttggtagaatttggcaggctcaccgttcatccttacatgagccgtgtgagtcaagcactgggccagctcggcagaggcatcgaagttcaatcacagcgcaaaatctaatcaattctcacagtcaatgaatgaactgatgattcaggtatttatagcaaaaggtgtgaagagattatttggaacatggtggagggtaagaaacaggtataaatctattccagaatttcatttcttgtgagtcttctaggaaatgagatgaatgaacttttaaagaacattcattattcagctgagatttttgagcatctactatgtgccgggcattaggctagcttctagcaaaggagctgagaacaagactatgtgagcaccagctctcacagtgttcaaaatttatgtcaacatctatgctgagtgtgtagcccttattactcagcttggcactttacctttctctaagttgtcagaaactactagaaatttgaacggtttccatcaatgtattcaaatgaattgctttagtggtgggcagaggaaagatcctgttttttcctcccctaacacgcacatcccattaatcaacagattccttgttatttaataataaataaaaatacattaacttgttgaggcaaacatgtttcccaaagccattattaaaactgaattaccaacaacatggtttgaacagtaatatcatgaccacaagtcatttttctcagttgactttctgactggtgatacaaaatccatgggaactgtctgaattgcgaggcaaatattttagtaatgagtcgatccccaaaacaatttcaacactggaatggaaatttatacattccttaagctttgcttcaaagacaggtaaaattccttctgaattgggtaaatggaatgcattctataaactgtacccttttgttacaatgaacccaattgctcccgtcgttcataatctggcccagcaagccaattctttgttccattgctaatccatagtgcagattttaatctccaacaattagtaacccattcctacatatcttggaaagttcatgactgtcagggtaggcaatttttacgttgtgtatataggtctccaaagagacaatacatgtttgtggaatgaatacatgcttttaaaattcccatttcaataagtggagtttgcaggatactttaacatagcccagctgagaaaaattttagtgaaagaggaatctagaatagtagtttccaactgagggtgatatcatcccccaggggacatctgacaatgtttggtgtcatcttcggtagtcacatctgaaagagggtgctattggaatctagtaggtagaggccagggatgctgtgaaatattctacagtgcacaggacagctttcctacgatgaaaaattatctggccctaaatgccactagtgctgaggttaagacaccctgatctggagggaatgcttctctttctttcatctctctcactggggaagtcagctgtgttgtgagtaagctccagcagccctatggagaggtccatgtggtgaggaactaaggctccctgaacagcagtcagcaacttgtctgtcacctaagtgaggcatcttgcaagggcattttccagcctcggttgagctttcagatgaaagcggctcacgcagacacctagatggcaacctcatgagagattcccagccagaactagccagctaagccacacccaaattcctggccctcagaagttgtagaccagtggtccccaacctttttggcaccagggactcgtttcatagaagacaatttttccacaaatggtggggtggtgggggatggttttagaatgaaactgttcacttcagatcatcaggcattagttaggttctcatgaggagcaacaaccgagatccctcacatgtggagttcacaatagggtccacactcccatgagaatctaatgctgccccgatctgacaggaggcggcactcaggtggtgatgctcgcttgcctgcagctcatctcctgccatgtggccggttccttacaggccacagactggtactggtctgtgccctgggggttggtgacccctgttgtatgtgatacattcttctaagtcataaagtcgttagtaatttcttacgtagcagcagaaaactaatataagtaccttacgttgtatctacaccgaatggcttcattttattttcctgtattccggtgagtacaagaagaatggtgaaggatatgctttttgattttgtggagaaatgaagacttgcagaataaagcatcttgcttagttaatagagtcacaagccatttgatggagtacctgttgagagtatagcctaaggaagccttgactttgaagcccaaatctgccactttctagccaagtaacatctctaagcattgatttttaaaatatgggaacaacaggagcacctgtttgatacggttgctatggaaattacaagagataacaatgtaatgtgcttagcacaatgagtggctgatggtaaacgctctacaaatgttcattgaagaaatagttgttatgattacatgagtgagtgagttttttttttttcaactcaaatcactctgtttttctgtttcacatctttgccatttaaaggtttgggaatgagtctcaaagcccatgatttgtgatcttctggcattttgctgaggttgggattagaattatttaagttgcaaggtggcgtttggtggaactcagcgatctcccagctgcctgtgcagctgtctcaccagagccagtgaggcactcattctgggggcaaaatttagcagagtgccaaaaatctcagtactgttagggtaaatatttttatataatattttaaaaatccaattggcaaatgatggctaaccacctgtttttgtaaatgaagttttattggcagttcactactcacagctgtgaattcaataattcacatcacgctttttaagatgattattttcttaaatttatttttcgtttatatttacagtgaaatttttgcccttaagcaatattcatgtgtgcaagcaattgtgaggttaatggcacttatcccctggaatgggtctgtatgaatttggaagctgtggcaacatgttgcagacagcttatcatgaacagttgtggctggaactgataatgtcttctctcattgccaggctcttgatccttcctaattcatatgatttgcatccataattttggaactaaaaatatgtcttttaaacaagtaatatataaagagaaatgttccaaatcctatttatattttaatttattattttttatttccataggtttttggggaacaggtggtatttggttacatgagtaagttctttaatggtgattttggtgtacccatcacccaagccctacttttaattctaaggtgatagagatccaggattaaaaagaaggataaacaaaaagaaaatagaagtaaaaaaaaatagaaatcaaagcatcaactaatgatatggaaaaagaaaagccaaacctttgttctttgaaaaaactaaaaacaggcttttgttgagatacagacagcaaaaaaaaaatcctaagaataaagcaaaaacttctacaattatagatgttttaaaaaatcgtaagtgaatacagttagcaactatgtgccaataggtttataagtctaagtgagattgagaattttctagaaaaaaatgtaaattacttacactgacacagaaagtagaagaaaatctaaataaaccagtaaccatgaaggaactgaagtggtggcaaacatctgcaggcctgtgccagcgctggctccatcggtggggacctgagctgggtagtcacatggcggccccatgcttagaagtaccttgctcagggtttaattctttgctggctttgggtttaattctttgctgctactatcttaaaattctttttctctttctttcttttttttttttttagacaaggtctcactcttcccacaggctagagtccggtgacatgatcacagctcactgtagcctcaaactcctgggctcaagtgtcacagctcactgtagcctcaaactcctgggctcaagtgatcctcctacctcagtctccctagtagttgcgaccacaggtgtgcaccaccacacttggctaattttttttttgaagtttttgtagagatgaagtcttgccatgttgcccagggtggtctggaattcctgggctaaggtgatcctccagcctcagcctcccaaagtgctgagattacaagtgtgagccaccacacctggccttaaaattattagtttgttatattaccatatataaattataatatatgttacattatcaactgttaattatattatgaaaatatagtaacatattattaactaatatattaatatatattatagaattaattatagtatatattaataagaagccctccttttaattttgtgcttggccctgcaaattatgtagccagacctgtacatactggtatacttttataggtgagtttttcaactaattttacagtactgataatctaaaaacttttgaaaataggaaaagaaggcaaattacccagttcagtttagaagatcattgtaacaattccaagatctcttgatgaaagtcattcagaaatttggagataaaatgttatttcattggacctgccaaaatatgaataactgccataatcatttattacctaagaagtttgatattgacccttacagttgagaattgttgtgtcttcaaacgaagttgttttctaattttttgttttttctgtttccagcaaaaagtatgctagaatagcttatcctaaattcattctaggttagttgataagttaactattttaagctcttccggcatttctacactcttaaagtcttaatatgaatttttttccaggtcactcgctagtgaaccttggaaagatttggcaaattgacttaatgtttgtccaaagtcagactcagcttatttttccggaagctctaagttaaaaaaaaaaaaaagatggaattagtgttggaaatcttattaagaatacagtggaagcatacttgttttgttcttttgttctgtttctatatttctgatccagctacgttgtttctctataaggcgggcagatcatttgaggtcaggagttggagaccagcctgggtaacatagcgaaaccccatctctattaaaaatacaaaaattagctgggtgtggtggcaagcacctgtaatcccagctacttgggaggctgaggcaggagaatctcttgtacccgggaggcggaggttgcagtgagccaagatcgtgccactgcactccagcctggctaatagagccagactctgtctcaaaaaaaaaaaaaaaaaaaaaagggggctgccctctgtttcttgccacgagggcctccccaacacaattgcctgcttcatcaaaacagatgactattacaatcctttctcacgtaatcaccaagtgacatctcatcaccttcgacatattctattggttagaatcaagccacaggctccgccacacttaaagggaggaatttacacaaagctttgtttgcctcataaaatatcattcacgtattattttacttagggatcatcttttaaaacttgaacaaattgatttacaagtaaattttgtagtagcaccagaactttagaaataactggtattagcagaagataattgcaaacatacatattaccagcaataaaaattacttgtctgtgtaccttgaaaattcatcctgtgtataacttgtgattatacataagcatccttaataaaatgctgaaaaaaatcaatgtaatacacttaatataatgccaatcacacagtcagcccttaatcaatgtaagttattcttattacagatctattaggttggtgcaaaagcgattgtggtttttgccattacttttgcaccatcctactacaagtttggtctccagaatatattgtatatcggatgaaacacaggctgaacatcccttttccggcacccttggcctattgatcatgatcttctttcctggcatgcttggactcaacttcagaatgtttcttgatactgtgtttcaggcaactgccaccaatcaattggtgttggcacaatccagaggaccgctaccggtctccagtagatttcacctggtgtagagagatctgggccaatcataacagaaaaaaagcattaacaatacataaaatgaagggggaaaattgatctattaaaaagaaaacaaatgcagatgaaaaagcaaagcatttctttttcaagtatgtcatcaactctcaacttcatatttattttgtcttcctgatctcttttctcccacaatatgggacatcctcatcactttacctttctgctcaatgtgtgcaaaatatattgcacacccagttttatgaaagcacaacagattcgggaggagaaagtttcctctgtgcaaatcttctaatcaattctaaagcattggtacttgggagttgatgctacttgagaagctcaggtgcaaggcatcctgatgactaagggttctgcaaatattttattgctgataaaggaggttctagaggacaaaacaatcatggagaagcataagtgatattaatcacttattaggtcaacttccaacccaggagattaggaaaagctcaacaaattaggccaaatcataaaatggcaccttggctttcaaccaacagctttctcctgaatacttgctgatagattcattgactgacccatttaggttctttgagcaccaagaagtgcagggaaatgagcaagaactatgaagtcagacagactggggtttcagtccgagcctgcttgctgcatttccctgagcaagatacttaacttctctaagcctaattgaaaaatgagaagattcccagagatttggcaaggccatgggagaaattgttgggacaggttatagaaaaggactaaaatactcaaaatagattagtggccctaatcagatatttgtgcatttcagctttttagagaaatgcaatgagatgccctaaaaaccaaaggaaaaaaattcatagatttctagaacgtgcaaaatagacgttgaaaatgaggcgtgccaggtgctatcaagagtagaggctgagtcaggactcaatgttggggaccgaagctcaggccctgccccagaaaggattagctccagctgatggctttgtgggctcaggggccacacagaccaggacctctgttttttcacagaagccagaaatatgagatggtgcatctcatcccacaactgttaaatgttagtaaatctttaaatacctgctatttactgagaattcatcatgtaccagacagcttctaagagttttagtgcattgtttccattgattctctcaacaactgtatgaaatatgttttgatcattatttctgtttcataaatgagaaaactcaagcacagagaggtcagaatcacttccccaatgccacacagcagaggagctgggatttaaacccaatctatctgcttccagcactcagttcttttttttttcttgagacagagttttactcttgttgccaggctggagtgcaatggagggatcttggctcactgcaacctctgactcctgggttcaagcaattctcctgcctcagcctcccgagtagctgggattacaggcacacaccaccatgtccagctaatttttttgtatttttagtagagacagggtttcaccatgttggccaggctggtcccgaactctcgacctcaggtgatccacctgctttggcctcccaaattgctgggatttcaggcatgagccactgtgcccggcctgcacccagttcttaaccacctcgatacactgcctatttttcttttcttttctttttttttttgagatggaggcctatttttcttttaaattattttgacataatttcagaaaagttacatgaacagtacaaagaattcccatataccattcacccagattcttcaagcatttgcattttactactttggttttgtccttctttttctctctttctacatacacagacacacagacacacacacacacacacacacacacacacacacacacacacgtcttaactctgaatgctgagcttgcctagaagcagtaacatcccagtagcaacaagcaccaggagccaaaatctcgatttctaaatgttcttttctactgaaacaaattaggacttcttgaagaaacagatgattccacggtggggcaggtaaagtacaagatcagcctggaatattttattgttccagaaagcaggaagtgctcaaaaatggtaacaacatgtcaaaacaaacaaacaaacaaaaaaccagcaacaatgcacaggaacctatttaaagaggctcccattaatcaaatctggggcaatctgaatatcaaaatgaataatgacagtgtaaaaattataacccattcaaaaacataagaatctgcaagctcgcactgacataaatagacataaattataaataattaattcttcctgacagcacgactgtaatctcagcactttgggaggccgatgtgggcagatcacaaggtcgagagatcgagaccatcctggccaacatggtgaaactccctacatagctcaccacaatagcaagtttatatgcatttctgtgattatttgattgacatttcctccccttgttcttccccatcctccgtagtaggatacagatggcgtaagagcagggacatgtttattttggtttgcccctgtacccatgatgcttggcttacagatcttcataggcactcattaaatatttccttttacctggttgtcctagttgtaatgtttacaaccaccatttatggtaaccaataaagctaggcaaatttcccaggactcgtgccaagttgtaaatcctcctctccaaggtcttctagattaccaggtcatacagtgcctgtcacagggtagatgcttagtgactcagggcaattgtgattgtcatcagtaacacacgctgctcagtgctcgtagcttattatgacacctttctggtccctattctgtctccctcaaggctgactccatattttagctttaacaaaatttccagggatatttgtgggaaaccagtacacaataatatatatggaattcagtccagttggcttttgtgatgtccaaataatttttttgagagagaggaagggaaaaataaaaagagagaaaggaaaaaaaaatgaaggaggaaatggagagatcaaaggaattcctcaacgtttgtagcagggattctacagaccaggtactgctcccccggagagtaggaattatttatggggaaattacttacacaggggatggagtgaggttgcattatatgcacacttaacccaggcacatccaaccatccatgcttggagtggaaagatgactatggaaggatgtagcccaggtgattccaacaccctcactcaatgagaacagcaagatgagaaacgagatccacctcttgccttatttctcatgcacatctcaaaatgtgagctcctgatgcccttggtgtggttctagcatctgaggaagtgcatttttcatgtgacatggcccctagacataagccaactactttaggttgttttcacccactagagcagaaagcttttccaacaccggaaggaatcctctgtggattaaaacccatttatgcctagtgttccattagtggaacgctaagcttctgggagttattgaaatcccactgcttaaggtcatcgctaaggtctgatttttcacaaaaaaatttgcaacctctggcataaatgggttaatgagggatgaaactatgtgtttacggtatactttacagataattgaagggatgtaaagtttaccgtaactctaagaaatttttactctggttgactttcaaacctaaatccccagtgcgctttctcgctaatgaaacacctgtgagttccataccccttaaacttcatgctgatatagcaggaaaaatcctagattttattttattttttgatattgaatttcacttttttgcccaggctgaagtgaagtggcatgatctcggctctctgtaacctccgccccccaggttcaagcaattctcctgcctcagcctcccaagtagctgggattataagcacctgccaccatgcccagctaatttttagtacagatggggttttgccatgttggccaggctggtctcgaacccctgacctcaggtgatccatcggcctcggcctcccaaagtgctggaattacaggcatgagccaccgtgcccagccaaaaaacccctagattttaaagttgttaacttcaccaggttttaattctagaggagtcatttcccaactgtgtgacatggggagtttacttaacctctctgagccttagctattcaatggacgttaacatatgcgatgcacaagtgttctcatgaagatcagaaaatttgaaatgtacgtagctcggtgctgagcatagagcagggatggtgtccaaattcttatttcctcaatcagagaggcaaaagtcaaacaactccctttacaggggcagaacctgtcaaaagaaatgtgctgggcccaaatgggaaaaatgagacaattacaccatctgaaaatacaaacacgatcagttttacctacttgtggagcagaacctaagagacttatgggaaattaatttttttttaagtgaaagcaagtttattaggaaagtaaaggaataaagaatagctactccacaggaagaacagtagcatgggctgcttgattgagtagacttgtagttatttcttgatgatatgctaaacaaggggtgggctattcatgagttttccaggaaacaggtgggcaattcccggaactgagggttcctcccccttttagaccatataggggaacttcctgatgttgccatggcatttgtaaactgtcctggcgctggtgggagtgccttttagcatgttaatacaggaaattaatttacttttctgtttagagtcttcttgggactgatggagaatcaccaggacaattacaaaatacagtggactccatcaacccaatggtctaatcatgggaggttttaccctaaatactggaaactacaaatccacagattaaatttgatacatttggtttggttcaaatctagttgccaaatagtgatttttctaatcccatcaattttgtatacttttatttaattaatttattttttgagacagagtcctgctctgtcgccaggctggagtgcagtggcatgatctcggctcactgcaacctccgcctcctgggttcaagcaattctcctgcctcaggagaatctgcctttctcctcccaagtagctgggactacaggcgcgtgccaccacgcccagctaattttttgtatttttagtagagatgagcagtacatgacgtgcatcccacaggtccgggaaccaatctatctttgttggaatcctggcttccctacatactaactgtgattctaaggagattactgagcacctctgtgcctcagtttccccaggtgtgaaatgggaagaatgatcacatctacttacagggcagtgacaaggatttgtgaattcatatgtagcaagtgcacagaggagagactggggcagcaagatcagtcaataaatattattatcatcatgaccacattggccatgtcagtgtcggctccaggcaacctgctcagggaggtgaggggcagcagacgtggcccttgctccaccctgtgctcctcacacccatttgccggtctttgtgcccttcgcccaggtttttcatgctttgctcctcatggctggcacctgcagccttcttcaaagactaccttctggctactatagccattttgcctggacatgtaaagtctagaagtatcttagagtttataccccaaggtgcagcctgaactgaaggagtgtggaagccctgctccctgggcacaaggagaacaaactgagctgcaatgtacactccagagctcccagagatcaggctgaggctggaacttcactcaaaaccacacgcttgtttggcttctttcccttcctcatcctgctgtccccacagtcgcacaggtctccttgggaatcacaaccctaatgaatcccggtgctggggacagcccctgtgggatctaagtcatcaaggaagatttccttcaggaaatgaaagctgggtggacgtagatggtgcgtaggagaagaacaggcagagaaagagcatgccgggagggagacggtgggaagaaccctcttgctagcatttaaggaacagcagaaactggcagaagccactgtggcctggttccagaggcctctgggggtggatgatgtgggctgaggcctgggggatcagtgggacctcagttgatagggcctggaagtgtggattgcagaatcggatctttacgtaagagcaatgggaagccccagaggcaggatgaggcatgatcaggtttgggtttgaaaagaccagtaaggcaagtgtgcaaagaacagaggggaaggaagcaagagaggactgagatcagctgggagctcctgcagagactagagatattagtggtccaggcaagagattgtcagtattgctcccagccacggaaaatttggctgttgtaggtctttcattgtgaaatgtaaacttattcttgggaattaagtattcaaacagtgaatgtggtaggcaggggctgaaatggttcgtaacctctacctgactgccaagtgccagcctccctttcatgtcatgaaagatacaagagagaacaggctcccaggccgttctacccccctttcaatcacacaaccagtgtgtgactgattgtgtgattggaaagggggtagagatagaagtaactggacttgggaaatatttaagcagcaacaaaatggaaagttattttgcaattacaagaataaactttcagtaaaactgctattaaagtctagatttatctaagggtaaattttgtgatatagggcttgtaggccatatgagaaaattttctaccagtaaaataaagtttgaatttgtttttattttgttgtaacaaaggcaataaagaggggaagtctctcaaatatttaaaaacttttatttttactttcagagaatttgaaggtatacagatgaaatctgacaagacgtgaatttataattctaaaaataatttcacagcagagagaaagcatatacctagatatgtacatatttattacaatataaagacataaatgtatatttctgaaatattctaaaaatataatgtaggaagaaatatttatcaaatacacagaattatatacagtatgcatttaggaaaagcagtagtaaaaatatgcacaaataaaccatctgtaaacacaatttttaagtcttataagtattgcatgcatttctgtgcattttacatttatgaaatcatatttttcctaggagttcaaatcacaaaacaaatgttatataacagatctctaacttttgcatgctttacacttgtcccatttaatagacagaaaaattatggcatgggaaatcattttataatattaaagtcacactgaatgtttttaagctgtgactaaactttgaaacattgccctgcaccacagatcctaaatcaagtactgcaaatattaaaaaaatgactgaggcaaattaccattagaacccacacacacatacacggacacacacacacagacacacacacacatgcatgtctgtgcttcatatgcacatacacaatttaaaaattattgcttcatctttaccctaatgccataaaggaatcacatttaaaaaataaacaattttaaggtcctctaacaaaataatgccccagtgaatcactagtcttataagttgtttgacttcgttaaagtccttttaaaaatagaggtgttctctagtttcccaataatgtttttatttcaatgcaggaagaacgcaatttcatgggaggcctgataactttaaccatcatttagcttggcttacattattaagcagggacattttcctaagtagtacattaagcagagctacagtaaatggattgtcagtattactcccagccccagaaaatttagctgttgtaggtcattcattgtgaaatgtaaacttattcttgggaattaaagattcaaacagtgaatgtggtaggcagggcctgaaacggtttgtaacctctacctgactgacaagtgccagcctccctttcatgtcatggaagatgcaagacagaacaggctcccaggccattctaagcacctgaagatggtgctgacacaggtgaagtgtaaaccagcagtgaaccctgtagaatgccttggatcccagcactcagtccgcttccctgagttggatatgatgttagcaaataccaccatctagaaagacagtacagcttctggaacaattttgcagaagaaaaagtatcaacacctgggcctaaatattctttataagctgttgtatggtgtggtgtttgaagtttgctttccggtaacgtagaagccataagcaccattcttgcagaaaagttgaaatggctgttttggtcttggtaaaaaaaaaaaaaaaaaaaaaaaaaaaaaaaaaaaaaaaaaaaaggtataccctaattgtatatcaaagaagtgtatttaaacaagacaaattattagccaaagaaaaaatgctaaaacttaaaaggtgtggcttactgtgataaacatgcatgctctttgctgaaggctggggtgtcacaatgcagctagaatactttccttaccctacttgattcagttctgttggttgggatgctcagaatttgacaaatttcataatagcatcagacacttggtggaggaataataatgtattcatttgggccttgttcagaaatttcatctgtaattgcatgtttctctaaataatctaccaataagcaaatgctccttaacttgccattggcaaacagcatttttttctaggaaaatcctagaaggtgctgctaaaagaacacaatgatagaatccgggtttaaacaccgacatgtcagcctataaagccatatgttacaaatgtcttatttccaccaccaggggtggtggctcacacttgcaatcccagcactttgggaggccgaggcgggtggatcacgaggtcaggagttcaagaccagtctggccaacataatgaaaccccatctctactaaaaatacaaaaaattagctgggtgtggtggtgtgcacctgcctgtaatcccagctactcgggaggctgaggcagaagaatcgcatgaacccaggaggcggaggttgcagtgagctgagattgcaccattgcactccagcccaggtgacagtgtgagacactgtctcaaaaaaaaaaaaaaaaaaaaaaattagggccttcttaggctaacttttgatcacttcaatagttttgaattcattgtaatgtctattaggagaacataactagacttactaactcttaatttcattaaggaaattattactcaggacgaggccaacatatgctatttggcttatgttatttaaaggaaataactcagtagtattgaaataaatagcacctggttggtatatggacatggcaaaagttgtggagggaacatgagaactcctctattgtcagaaaaagtattgaatggcatactgcagaaaaaatattctattgtgttcaatacaggctgataaatatatacatttatattacatgtggttgcataacacaaacctagaccctagggctaaatacagtccaccgcttgttttttataaaatttatcagaacacagcctttgtaggcagaataacagatctcctaaaatgtgaatgccctaatccctggaacacgtgaatatactaccttatatgaaaaaaagggctttccagatgaaattaaatttatgaacttggagatgggagacatgatcctggataatatcttgtcagacagaagcaatgtaagaagaaagagagattcaaagtgtgagagggactcaaccaaccattgttactggctttcagttggggaaggtttcatgagccaaggaatatgggaaatctctcaaagttgaggatcgccttcagctgacagcagcaaaaaaataaagacttcagtcctgtaaccatgaagaactaaattctgccaacaaccaaactagcaagagaatagatcctcctctagaacctccagaaagagccccgacaacacgataattttagcctggaagagcctcatcagacttctgacctatagaactgtaagataatagatgtgtgtcgtgtaactcactaagttttagtaatttgcggtggcagcaatagaaagctaggacatcagctcactcattagtttacaaattgcctgtggctgctttcatgttccaaggtagtattaagaggatgtgacaaagactgtatggtccataaaacctaaaatatttgccaactggccctttacggaaaaagtttgccaacccttactattcacatgcaaaaaccatgaacagctgctagcatttactgaacacttaattgatgccaggctcaggaataactacttggtattcatattaaatttttgtgatacactctctttgggtcatcattttacaaatgaaaaaaaaaaaggaagtagagagtttagggaactgctcaaggtcacccagcaagttagaggtgagctgggattcaaaccccagtctggctgacttcccagcatagctcatccctcgtcattctcactaccttgcagaggataatgaaccgcctagatgctcacctgaggcgtattatcgctggcaaaacgcgatggggagttcccggctgggcaccagggtgcctgagtgtagcatctcaacaggctcattgtctgtggcctggatgtcgtatttgcggacaatctgtaatgcacacgcacacaaaaacagaattacccctctcttcttctgccttgtgaaacagcacagaacataattgcagaaaccggtaaaggttttacccaacaaagagccaaatgcagttgaagctctgctaatcggcgaccaatgcacattctttttccaacgccaaatggaagatgcgcaaaaggattaattttttccttctcctgaagccaacgttcaggtctaaactgacttgaatcttcaaaattgtcttcactggatcccaacacctgggtatttagcatgagcactgtctaaacacatgcagagacacatagtatttaaaataaccagaagagacctttgaatggcaaaattgacacaagttgtcaccttacaaatcaaaagccaaatccacaaatttataataatgatggttgccaacatgcgctgagtgcttaaaatgtgccaggtaataaataggtaaagggctttagaattgtgcaccatactcacaaccaccctgcgcagcagattctgttattaaaccccttttacagacgaagttgaggctcacagagattatgtaactcactcaagacaacacagataaaagatgaaactgaatgcaggtctctgtctccatagccgtgaattctaattctatactatgcaacatgtcaactattctctaccatctctgcattcccaaaatgaatattttccagtacaaagtctagggagatctggtgaatatttgcaaagtgtatcttccaaggttttgtaaggtatagaatatacaaattctacttactcctttgggtaaagcatattcacccagaactgttgccttgtcaagagtccgagttgtaaatggtacactcggcgtaagcctgaaaagataaaatcaaagatgtaaaggtgagcacagtctaagttctctctgaagtgtcaatgggaatgcagattggattaaataaatgctgcccaagtgcatactcaaagaggcagcatgatcacagatcttcctaaagaagttgtttttttcttctcaataattgtatctcttgttcctctcatcttcttgagttagttaaaaccccagtgcaaggctgtttagtaaactgttaacgttggttttcccccttcattccagactaaaatgtgtatgtttccgtgctagcccttgaagcgtgatgtttgttctatgtttctccaatctactcttcacaaagttgacagtatccttctaatcctaaaatgttgtgagttttgttttcccaaaaggatgtaaaaagaatttccaaaaaatgttttataccagaggctcaaaagcaaagctttctctgtgtcctattatataataatatagctcttttgtgagcctccatctcataaccttcaatcatgcccctatcttaattagtgcttacagcgttcattagagtagcaagattattgaattaaaggggagggcactggctttccaagatttaatagaatttgcccaaatgatttaggaaatgagtgccagaaaagaaatatggctccaaagatttttttgcagtgtgataattgtttctaattagctaggggaagccgcccatgagtaggggaccacttgttttgtgtttacgagaacagtgttctaacacatttatattggctcagagataggctcttacctcatagattctttcagacaggcttttaaatacggcatattcctcaaatcttctgcccgtggcacctgattctcaggtaatacactttgaatttccttaagaagcttttgttgcacttggggattacgggataaattgtagagaatccacattagactgtttgctgtctgcaagccaaatggacataaacttgagtttttgtaaataactgcattaaaccactattagctgaaaaaaaggtgatgcccaccaccttattctgcaaatgtatcagtgaagctctttcacgcgtccttatagctacgcctttagacaaatccaatatataaaaaagcagacttatttcataaaacatatcaattaaggatatattttaaattatttactgagggaatcaaagtataatcctttaatcagctgctttagaacatttaaatacagtttttttttttttttgagatggagtctcactctgtcacccagactggagtgcagtggcactatctcggctcactgcaacctccacctcctgggttcaagcgattctcctgcctcagcctcctgagtagctgggactacaggcatccaccaccatgcctggctaatttttgtatttttagtagagatggggtttcaccatgttggctaggctggtcttagactcttgacctcaggtgatctgcctgcctccaaaagtgctgggattacaggcatgagccaactgtgcctgacctaaaatacagtttgacgcaataattgttcgaacacaaatgagtacatgtaaaattggtgaaatgagaatattagtgggttaaatcaatgccaattttcagattgtgacaacgttttctcgttagacaggacattactattagtggaaaactgggtaacggatgcaagggatccctttctattttttcttagaactgaatgtgaatctacaatgatctcaaaataaacatttaattaaaagttgcttgatataaaaaacattcatataaaaatggagtaaacagagagggatggtgatcctcagggtgttgctaatgagaggctttaagagaatgttatagtggaaatggacaataaatggcatttctgaaatttaaaagttcctttggccacaccctaaaaagtcaccacaaaaataaacaggcactacctacactgagggttacaaccacatgtaaacagccctcatacgagggtgccaacaccaaaaataagaaattcaaacattgagctgagtactccagctacagtttctgacaaaggcccacacccttttaagtggcatcttttatttcctctgcacaggcaatgactagagaaaaaatattggtggaaacagccaatgtagctttaagctacataatattcaccactagtagtcatatgtatttattttttaggccgtactttgctaatttaagccaaatatttcctgaaaatgatcattgtgtccacctccgcagacatgaagacgctgttgctaagtgccatgtgccactcacacaaatgagcaccaagtgcaagaccattcagagatgatggttattttattatttttggaagaagatgcctccaaggcagtcttcttcatgtcagaggactggcagcctcggctgcaaataaactgtagatgccattattataagagtctaatttacaaaacaggaagagggtgtagccatcaaattagatacactttcaaatggttctgattttccaaatgtgactttcagaatagccaggaccaaaaaagaaacagatttaaccatatcagtgagtccctcaccgcaagtaccaaatagagtttccaaagggcagatgactgtagcttttaccaaagccacgtaaggcagtctgagcctgtagggaaaactgcaggggctaagctgcagcagctgatttgaggggaagtggcctggaaaacctcaggggcacaaactatccttgattgacctccatggaacagaccaagctcattgactggcctgctgtacccactctcttggctaagtctattctccatccaccagccagagcccacttttaaaaacataaatgatcaggtgattcccttgcttaaaatgctgcaagagcttcccatcacaggtgcaatcaaatctaatgccttacccaggctgggctcacaaggctctggctaacatggcccatccaattctccagtctcagctctgaccacatttactagttctgtagctccatccctctttctgccccagggcctttgcatgggccgtttcctctacctgcagcgctcttccacgaggtctttctgtggctggctcttctcattattccagagtcagctccagtactgctttctcagagagggcttccctttaatcatctccatctctctatattacaccatcctgatggcgtcctccacaatccacaccactatctaaagtgaccacatttgtttgtttacatggctactgtctgtcttccccacttgcatacaagttccatgagagtgggaacccttgtctctggttcatggtggtctctcaagaacctggaacagtcccaggcatacagtaggcactcaatagttcctgaattccttcatttattcaacaagtatctatcagccgctactagatgccaagtactgttctatgtcctggaaacacagcagtggacaactctaagccattgccctcagagaggtcacgttccagttgaaaaaataaaagaataatgggtgacactgtactttgatcactggaaggagccacccagggtaagcagttcaacaggaaagtgagcgaggatggattcccactttcaaccgccttgtggagcaggaggagaaatgagaacctcgctatctcctgatagagaaaaccctacctttacttcaggcaagaaacagcacagaaggggaagcacatggaaaataaacaactgctttacattttgcttagagactttaaggtgcatgaaatgttggacttaggaggaggttagcgtgcgccactcccatcacagctcgaactagtatccaagtcaattaaacctacctgaatgcctatggcaggatttgtttggggttggtctcacttagtatctgctatctcctagggagtatcggccacatcagagacagaattttggtctttacaatgagctgttttgcttcagttaaaatccacttgtcccagactctttgggactttgtttacaattctaagcagataaaaatattattggcttgaaagagagtatgccttttttttttttttttttttttttttttttttttacagtaagtaacagccacagttaggcactttggggtaacatgtgcaactgaacaaaatacttccaattttgaaaaatctggattctgtatcttgccagggcagagaactttactgctcctgaactcccgtagcagtttgcatggacatcatggcactcatcacatcctactctggctttttgtcactggggcacatgaagtctcctcctacccagagtttaagcacagaagcccgtgcatggaggcaccgtggcgtctggtatgaggccgtgcgctgaggcaccgtggcatagatgctgtgcgcggaggcaccgtggcatctagtatgagacttttcatttttgtggagttgatgctagtgaatcccagtgaaatgaatgagatgaattactatttaaaatctgtcatctaaaaatggtacagaccgttcatttagcaaactcaaatccagcccacccttaccgtttccaccgcagccagctggagctctgtgacagcagcatacaattctttctttgaaagccgattctggtgataaatgtcacaaaggaaatctgcactaggctgctgagaatacttctctaaccggttgtcgatacaagctttgactattagagcagagaagaaagagaggaagtcagctgaaaattgggatgaggaaaatcacagaagaaaacctcagtccaaactccttcttgcaatatctaaatagtcttttcaggaacactgacaatttgctacacacactaattatattattgccttcttgtcaagtcggcaaggatttttcaataccgacatgagcaaggcttctcaaactttaatgtggataggagtcacctaggcatcttctcaaaatgcagaatctgaatcagggcttgggtaggcctggaactctgcattcctaataagcttctaggtgatgctgatgccactgggctgcaggtcatagttttgagtagtaagagtttagatcttgggagaaaaaagtgtaaaagaaggtaggatttgggttcactttcagaatccaacttggacccagatattactaagcacacataccccacatacatacgcacaagtagagtgtccatccatgttgacaataatggtaaaaatttctaatatttataacataaaatctaggcgtgtacctccctcactattaagcaaacaaccaccaggctcattatatggtaataatcatgctgatcacatatggcacagcagttagagttcgagtcctggaagctccttgtctggcttcaaaccttggctttgccatcacctagcatgcaatcttgggaacgttggctaacttctatgtgtctcaggtacccctctcagggctaataaaaggacctaccttataggtgtgttgtgaggattaactaaatgtgtaagtgaacaatgcctagcatcaaatattccccttcgtcatgtggcagaaatagatctagtccacggagatactgtgatatgccaggtttttatgttaactgtaatctgtagtagacccagaaacagttacattgaggtaggttctcttattattattattaattattagtccattttagagacaaggcaactgaggatgaaaaggtgattgcacatttggccaagccaccacaaccagtgacagagctgaacttgaactcaggagtccctgactctataaattttacttttttattttgagatggagtctcactctgcctcccaagatggagtgcagtggctcagtcttggctcactgcaacctccgcctcccaggttcaagcaattctcctgcctcagcctcctgagtagctgggattacaggtgcccaccaccacgcccagctaatttttgtatttgtagtagagactgggtttcaccgtgttgaccgggctgatctcaaactcctggcctcaagtgatctgctcgcctgggccacccaaagtgctgggattacaggggtgagccactgcacctggccagattttacttttaaccactcttaattcccaaagaagactacagaaagcttgttacttagaatttgtgtatgctggggcaatccccaaaacacctgtgtttgcaaaacctaaatgtggtgatgaggctcaggagatcactccagacctcctctctgaagctccagacacgggggtgctgggctggttctggctggttgtgaagggcggccctttacctgatttgaaaatggtgtcccaggccagagtgtggtcctgccagaccttggtgttgaggctcttgtgcagctcgactggagtgaccatcatcctcccaaacgtgctcatcatctgagagaaatgcaaatgcctttttattctgaattctccttctctcaaagacaatgttcgttctggaagaggaacattctaaaccgcagcaccctgcactttttaaaaggctggaattacaaggacacccccggctctctctgcaccggtcctgggagcaatgcccgtaccccacctccacctcctttcaatattgaaggtaatgtgggggatgattttccactggatgtgtttgataaaaattgtaatcttatgacctaattgtaaaaaaaaaaaaaaaaagaggaaaaacgataactttcatattcacttcaatttctaataatttccaaacttcagtgatttccaaaccaatttcacagcgtttatcctatctacacgccacccaaactattcaaaaagataaaatctgaaaaattttgggctctttttaaaaagtatttttaatcaactgatctttaattaaaatagctattttaaccttgcctaaacaaagaaataatggatttaatgtgcttctttatgttacgtgcatatatccaggggtccccaacccccaggccgtgaaccagtactggtcagtggcctgttaggaacggggccgcgcagcaggaggtgatcagcgggccagcaggtgttaccacctgagctctgcctcctctcagatcaatggctgcattagattcttacaggagtgtgaaccctattgtgaattgcctatgcgaggaatctatgttccacactccttatgagaatctaatgcctgatgatctgtcactgtctcccatcacccccagatgggactttcgtgttgcacgaaaacaagctcagggctcccactgattctacattatggtgagtatataataataacagaaataaagtgcacagtaaacgtaatgcacttaaatgatcctccctcccctgccccaccaccctgccctgtccatggaaaaattgtcttccacgaaactggtccctggtgccaaaaaggttggagacagccgcatatatgcacataaatatactaaaatatataatgcacattaaaatgaacacttaactattgaaataaaatatgtgtgtatgccattttttgggaatcactgtgaagttctgtaaaaatcgatctgtaaaacatcaatcaagaaaactgctttcttaaagaggctgcttactgttttgatggccatgatgaagttcacagcttcatcccctgcattcttctggagaagcccaaatctcttctcatacaacacgaggcagatacctgtcatttaaaataatcatcactttacacaaacagcaatgctggagttggagtctatgtttagctggttattaaagactcaattctatgcctcttaaaagtgtgggattttctgagaaaaggcaacagtccaagaatattgaggaaaagcagagtctgagagaaaggggacaccatcactttctttttctagaaattatctccaggtccaatgactcatcacctcagagtgtcatgatcagagatccactgtcctgatcaagtcacacaggagatccaggggccctagcaaaggtgctgcagggtcgggtctgcactctgcctctaacccagctgtgtttttagagtcacttattggattctatctcctgacataatgaattggaagccattcaccagaggaagagaagggaagggaataattatgttctaaacacccattacacgccaggtactgggctagcacttcatatagggttttttttccttccatttcatcattttatttagaaggaacctttttacaaataaaattctcaactcttcatttcaaaactttttacctagagaaaagttgaaggaatggtaaaatgaatacctgaatcccccgaactcatcaacatcttgctgccatttctttctctttgtgtgtatgtatgcatacaagtgtatacgtggttgtgtgtgctgaagcatctgaaaataattttgagctctcaggtcacttcaccgttaaatactttagcagtaatgtcctaagaataaagcattctccaacataaccacaatgtcattaacatccctaagaaccttagcgaccattccataaaaaatctactgtgtcccattttaaaatgttccccattgtcctaaaaattatctcttgtaaccttttttttttaaaaaaaggacacagggccgagcgtggtggttcacacctgtaatcccaacacttcaggaggctcgggcaggcagactgcttgagcccaggagttcgagaatagcctgggcaacatggcaaaacgctgtctctacaaaaaaataaaaataaaaaaattattcaggcatggctacatgtgcctgtagttccagctactctggaggctgaggtgggaagatctcttgggcccaggaggccgaggttgcagtgggccgagatcataccactggccactgcaccctagcctgagtgacacagtctggaaaaaaaaaattatacaggattactgcaaccaactttttagtggtggataattggctcttgacttataaagtaggagactagcattaaaaaggtaaacaaatggcctaaaatcataaacctgaggagtgagagtcaattagcttagtcagcacccacccacagcttttccaactacctccatgttttccaaactctacttatttcttcccagcctttcaaggtttccccgtatttgtgttccacagtggttggcaggtacaccactgggaatatgtgagatagctctggatggtacatgaactttaaaaataattagttactctgctgggcacaatggctcatgcttgtaatcccagcactctcagaggtggaggtgggagcatcatctgaggtcaggagtttgagaccaaccggtggcaaaaccccatctctacttaaaaaacacaaaagttagtcaggcgtggtatcgcacgcctgcaataccagcactttgggaggctgaggtaagtggatcacctgaggtcagcagttcgagaccagcctgggcaacatggtgaaaccccatctgtactaaaaaacacaaaaatcagccaggcatggtggtgtgcacctgtagtcccagctgctcaggatgctgaggcaggagaatcgcttgaacccaggaggtggaggttgcagtgagccgagatcacgccgctgcactccagcctggggcagagtgagagtctgtctcaaataagtaattaaaaaaagttacttatatttatctatttatggcaatatttctgaccttgaatttatggaagtgttataggttttccttctatccctcccatcagcagccacagtgatcctcccagtaaatctgcccatatatcacactgctgctgaatacattcccgcagctcccggttacttacaggctaaaattcaaactcccgctcatacagccctccatgagctggctgctggccctctgccagcctctgttacaggatatgcttgtcattccgcacttcttctgcagggacactctccttcctcccttttcacctggtgaactcctactcaaccatcaggacttagctgaggggcaccatctctgtgaagcgacccctggccatgtccggcttaggtggccctctcagattctcccacagccctgaatgtcctcagccaggcgctgtcccacctgatcacagctgcctgctctcctcttgcacccccatgggcagtgagctctgccctttatttccagagtaatctttgaagaaagcggtcatgtcctccctcccttacttgccccatctgagtcagatgagaggtaaagtcttgccaggacctatgagctgtgccctgttggacacctgccttctttttgacctcatctcctttcacaggctccccttcctcccagcttgttcatcgtgatccactcacaccagcagcttgaagttcctcaaactcggcgctcatgcttccacctcctggcatttgcactttcttctctgctgcctggaacaatcctccacaggtaccctcatgatttgctccttcccttcctttaggacttacctcaaatgtcttcttactaaaaaagacttgcccctctttcattctttcatgttatttctttctctctctctcttttcttctttatttcttttcttttttctttcctttctctttttcttttccttccctccttccttccttccttctctccctccttccttccttccctccctcccttctgccttccctccctccctccctccctccttccttccttccctccctccctcccttcttccttccttccttccttccttccttccttccttccttccttcctttctctgtctctctctctttcttgagacggggtctcacactgtcacccagactgcaatgcagtggtacaatcacggctcactttagcttcagcgtcccggggtcaagcaatcctcccacctcagcctcccaagtagatgggactacaggcatgtgccaccaaccctgactaatttttgtattttttgtagagacaaggttttgctgtgttgcccaagctgttctcagattcctgggctggcctcaagcgatctgcccacctcagcctcccaaagtcctgggattataggcatgtgccaccatgcctgcctttcatgttctttcttaactccctttctcttttcctttactccttggaagagtatattttaaaatgtgtttacttgttgactgtcaccttgtctagcatataagctccccaagggtacaggggttatgcgtttcattcattgtcatatccctagtacctagcacagtgccagacacacagcaagtattcaacaaatgtttgttgtatgactcattaacaatccatagttcaaggcataacttaagcacctaaaagaagcattaaaagggctgctctggcctttccctaggcagcaataatgcctgtttacaaaagagttgtcaaaagagccatgttttatccgcaaaatcacctgcaaaatcagtgagcaagtctgtgacgacaacttactttcaaacgaccatttgttcagttcgctgtacaagtcttcaacgtggcctctttcatcacagagctcatctattctgcccataaaatcggccaagaccttcaaagaaaacaaccgcaaaagacacattttaaagccgttgaaggaaaacaaaactttaaagctcactgagctaacttcaggtcttgctacatcgcatattcactggccataatgttattcatcctgaagtcacactaattatatattctccctgggaacccaccttatcccctaatgacctcgtcctgggttatttcctgagcttttcctgaagccaccctgaagcttaagtttcagcttttgatctaaaaataattctggcaatttaagaaaaggaaaacattttttttttctaatcagaatgggggaataaaaccacaaaggaatcagctaactgtccctgttggcccagcatctcaaggattgtgttgcagcagctatcctgaggtgtgcccttccacatctgggcaagcaaacgtctctttattggttggtggttatgttaagcatgttgaacttggaaccagaagatctaccaattctggacacagctccttccctaagtagtctatgaccttgggatagtcacataagacctttggatgccagtttcataaaccagagttttcaataactaatgcctcacatttaatgaggtccatatggtaccaaacactgtacgaagtgtattggttgatcctctgacaaccaagtagtagtaggtaccgtctctactcatttcccatgtagtagatgagaaagctgaggcttaaagaggccaagtcactcacttatgcacacagagctgataagttgccatcctggaccctgccgtgagctggtgtggccatacagcccacatgtgtggatttagtttgcaagtttaatttgcccgcatagcgcatttaaaagttctttgaatttgttaccattaaaaaaaacaagaggtttcatatgaacatatggatttaccactactagtttaaaaatgtaaataataattatgagacttggtgacatgaggtctgcattctgacatggcattcgtttgctggaactggggctgctgtccctcctgggaggggcatgcactatcacgtttcctgaaatttttactgggtctgccttattattttatattagtcatgtgagccctggaagcttctgagtttgcaatccttcacctatatgatcccatctggggacgcatccagttcaaaataaacatccaaagtgaacagaagtaaaaagagattactttatgcttaaaactccctttgactccgtgctggctaagggataatgtccaaataccttagtataatacaaaaatattgttaagacctatccagtatcatttcagagaaagcctcacatcagctacactaaatgaccgattctctgaacacaccacgtcatttcatgcctccctgttttcagaaggctactctgtctgccttaatgccttcccccactttctctgctttcagactcctcctgcaaaacccagctcaaatatcactacttaagaactttacaatgttatctcatttaattctcacagcaaacccgtggggtgggaactgttactcccattttgtagatggggaaactgaggcttagggaaggtaagtggtatatagccaggtctcatagccagggagtggaaagctggggttcaaatccagggctgtagaataccaaagtccacactctccattgctccctcattgtgatatgactttaaaagagggtggaggagggagaaataagggtttggtggggaggaggctgtaggaaggaatggagagaaagagaagacccccactttgaatcacccgaattgcattcttttttcctttgttctttgtagctgtgacttgaagctccaccaatatccctatgtccccacgagccccaggaaagctggccccagcctgcagacctcattgattttgttgtccagcttcatcacttcccctggtttcattagtttcttttgaaaggcactccggacccgctgccagtcttccccttccctgtgagagaagcaggaatacatttagagcacactgaaaagaaaagaaggagatgcagaaatactccagctgcaacttcaggaaccataaaatcaaacaaacactgagaatcatgccaagaaatagccagagaatattagcatcagaatatttgggataaaatagtgatcatcttttgacaatagtttgacaataggatgaaaaagcacctttcctcctagtcaaagattgcaccaaaaagttgaagtccagataatttgggttcagggattttgaggtgtccttgcagggagtggggctgggaggcctggggacaattcctagcggtaaaagggggcatgtgaacaccccatcaccagcaactcagatctgtttgagggaagaatcttgtcttctttcaactcattggtgtgggcttcatatttacaaaatatctcagatttagaattttgccatcgcctccaaataataacatacagtcagagagtcactggagtaataaaaagccttttgcgatcgtgcacttgtaggcacctgccccatagcagaccatacagcctgtgaagcaccgtgaattaatagggtttttaattccagtcattatatcctggaaaatataacgattaggcattacagtttgggggtaaataaaggtgctaacttgttaaatgctaacaactaaaaagcagaagaatcacatcccatagtagcatttgtcgacctaaaacacaactttgatatccctccttattccacctttacaagtagaaataaggcatgtcccccaatcctctgcagaaaatgtcactgtaaaaagccaaagaggctaactcctcgcttttgagcttacaaggtgtttcagggagttttaagggataattttgtttgtataagatgtttgcctggtacgctgacttcagaacctcatcctgcccaagagtctgaacaccacagttggtacaaccctgttttggcgtttctttgatgggagggtgtggccctgccctgttgccagagagaacgcaggtgctgggtgcacagcacggcttttccgtggaccgactctaatctgtacaagagctcagggttgcgatggcacgggagaggggctttggtatccgccctacgtaagaagcttccaaccccagggaactctaactccgcctcttcacaatttccaggcgccgtcaggctcatcaggtctggccgcatgcccaggtccctcggattggactcacaggatcagcagcccgtagccttctttgcggtagtcgcgataggccttccacggtttgatctccagccgctgcgggtacgcgctctcggtgcggtacagcgcttccagcaggcatggcgagcccaggtgcaccgactcaaaggaacccaacttcatgcggaaaatcttgccatacttcttgtggtactccacctgcagccggccgggcacagcgcggtgtcagcgcgcatcctccgccgtgcccgaagcgctttccctcctcccgcctccttcctcctaggggaccggggaccctccctgcccagacgccgaagcgcaccatgcgcccgaggcgcgcatgtcggggagggtttggagcgccactgggagggcggaagagggaggagagagtcaggggcgcgaaaaggggtttaccagggtgtcgtgctgtttcttgagaccccctttccagagaatctgcagcaggctgcccagcagtggccagctggtggggcccggcagggcggccgcgttctgagtctcgccaccagctgtcagcgggcagactggcacctctcgcggctgaggggacgtgtacgccgtagatgtcaccagtctcgggggctgcctcggactgcgcagctgctgcaggaaggcggcaagcgagcggctcttgctgatgggggagctcatggcagcgggggacaccggagcgcgggaaggcaggaggatggggtggggcgaggttggtacgaggtgctagtgggagtcggggcttaacgattctgggaaaaggaagcaaagagggccagctggtgtgatggagcggggtgaggcgggacaggcagcagaaaggacctcggcgaggatgctcgacgctgcaccacgcgacagcctcagagcattggtgcctccttgcactggccgcaggggctggaagagggtggccggtgtctggggacctcttgaaaagggaaagctgggagtcctcctgttggtccgcaaggctgacctctagggtctggctggagccacggggaggtgtcaaggagggtagatgagatgctgctggcgctgcgtttcctcctgtccctctccatgttcctatgcccagggaccatgcatttatggagacagagcatgccctgggtggccaatgagcacgcagaggagggcggagtggcccccggctggccagactccgagggacgcgggacccaggggagggggggtggaaggaggatggagtcagcgaggtgagcgagggcgtccgggcctggggtgaccggggctatgttcgctgggcgcgggaggtggggtgggggcggcagactccaccccggagataacccccaggaagtcatgcgaagcccggagttcaccgggtgtgcttcgaacgcgcctccccgccctcccccggcgggcaggagccggcagcggcggccgtggttgccgcccggcgcttgcacaatcgcgatgccgggcgggcgaggtccccgagtgcgggcccagaaaagctgccggcgtctgccagggccccggggagcccgggcgcctcccggggagccagatacccccagcctggactgaagtgattttttttttttttttgcctttttttttttggaggaagtttggctttctgcgcctcccagggtggggaggatttgagtcttactgaaatgcaccagaagaggagactttcttaacttgagcaagaaggggagtttgtagaatttccttcctgctgtttcatgtttggttgttttgcagattaaatgaattaatgcacgtaaagcggcaacaacgaagccttgtctatagtcaacagtcaataaaagttagttgctgttgttacttctttaggaagttaggaaatgcgccttgagagcgtggcttgcaccaacgatgcttgaattcaggctgggccacctcccctatgtccactgcccgcctctgttcttctacaccgactaccttgtgcaaaggaggggcacacagagcttgaaaccaccgcccccagtactccccctctcccccaaggtgcgtcctaggcaggtccagtgacaaacatacacaatttctagagttaccgcggctggcaagagtagaactcgctttgctaattcaggaacggaagttggagatttttgttgattgttttaaagtggctcgaatcctttcaacctgatccaatacaaaactaccaccagccagggaggaggggagggacattctgtttcctcgccctgcttttcaattacgtgtctcagtcatttttgccccaagtgttggcaaatccttccctggtaaattcttttgtaagcctctagtttgtttcttaaaaatcttttgcagtccaacttaagctttaacaccatcatttctgatttgtctggaggggctaatgactgtttatgttaataaaaataatagctattgatatatactaaactttatgaatcttgtacatatttatatatacattgtatggtatatatgttacagcatacactatagattatgttatatgcaatacacactaaatatacataatatagtatagattgcatacagtatgtagattccatatgttatataatattctcatgaaagctttctagggcttatgataagtcaggcactgagctagacattttacatcattttttccgtttagttctcatctcagcccaatgtcaataaaatgaaataaaataaaaaacaaaaaaaaatcaaagacaaacaaaaaaacccttgactcttacagagctaagtaatttgcccaatgtcacagacgttaccattggctcaggtgggattcagacccaatattttctgattctaggctgggccctaaatagtacacccatatacatcatgctatgttatgtcactttttcttaaaccagagtgtctcagaatattggaagtatttcttaaatgagaattatcaccaagaggaaagtgggggggatcagaatgcctaccatgtcagtatgtgtggggcagtgtgaggcaaacgttttatgtgctgacggtggtgaaaaagaatagctctggctgagtgtagtggctcacgcctgtaatcccagcactttgggaggccgaggtgggcggatcacctgaggttgggagttcgagaccagcctggccaacatggtgaaagcccatctctaccaaaaatacaaaaattagccgggtgtggtggtgcatgcctgtaatcccagctactcaggaggctgaggcaggagaatcgcttgaactcgggaggcggaggttacagtgagccgagatcgccccactgcactccagcctgggcgacagagtaagactctgtcaaaaaaaaaaaaaaaaaaatagctctaaacagaaggtctatgtttttcactactgagtaccttgattctggtgaggtgcttggacacagtgaatggtctattgttatttcaactattgagtaattttcccaattattctttcttttccttctcttttggcagatatgcacaaggagaagaggaaataatttcagacttgctaggtttttctaagagtttcatgctatatagctttatatactctaaatagatatttaaatatatgggcaatcattagttacatgatagctaaaaagaaaattcctgtttcagggatattggtttctcatgttcagtggagaaaatccccagtaatttttagaccggattgcagaggaaagcaagactagttctttgaaacttcattgaccccaatacatacctgtccttgagaagtatgattaaattcaaaatgactatttttgatcccgcttccaggaattcactattcctcatctgtcctcatccttcactcactacttagcctctatgagtcatccggatagggatcttgtcaggaattactaatgagagatcttgaaatgcctcataaatgcctgccatcattactgagacaggctcaggccctctgttttgctctgggaaatcttaccaagtcctggaatggataattagacttcagccctcataccaagggaccacccatgacaacatgtgtgtgtgagttcacacacctgtgtacacatgtataatgagggtggggtggaggagcctgtaggagttcaagggctggtttctctgcactggaaaatacaaaacactttcaagtatatgcaatagtaatatagttttgtgcttaaaactgcttaggcctggcatgatggctcacgcctgtaattccagcaatttggaagggtgaggcaggcagatcacttgaggtcaggagttcaagaccagcctggccaacatggtgaaaccctatctctactaaaaaatacaaaaattagccagatgttgtggcagatgcctgtaatcccagctacacgggaggctaaggcaggaggattgcttgaacccgggaggtgaaggttgcagtgagctgagatcatgccactgcactccatcctgggcgacagagcaagactccatctcaaaaaaacaaacacaacaaactttgcctaaactggggcgtgagtactagatccactttccgttgcggaaacctggaggacttacttgccgcatttgttaaatggacagtgttggttccaacctcacggtaaagttcaagcttcatggaaacaggagtagtaacaatagccaatttcacggggctcctgtgagaacactgcaaataaaattcctaccacagtaaagtgcccagcaaatatgaccttgtagcattactgtattgcatgccttggttttttcaaagtccatagaagggaggcaatttagatgtctctgactcaagaaactgtatacttgaataaagccaaaggaagattagcaatgaaatgctggtgaattcaaatcccagctcagccactgagcagctagaaaaaccagggacaatttacttgtctctctctcagccttagtttcctcttctcaaaagtggcgatcaggacgggtgcagtggctcacacctgtaatcccagcactttgggaggccaaggcaggcggatcacctgaggtcagagttcgagaccaacctggccaacatggcaaactcctgtctctactaaaaatacaaaaattagctgggcatggtggtgggtgcctgtaattccagctgcttggtaggctgaagcaggagaatcacttgaacctgggaggtcgaggttgcagtgagccgagatagcgccactgcactctagtctgggcgacagagtgagactccatctcaaaaaaaaaaaaaaaatggtgatcatggtagtagttcccactccatagggtttttctgaggatgacaaagcactgaaagtccctagcacatgtgctcactgttaatgtcattaagaactacaggaactgggctgtcaaataattaaggtcataatctttattacatgtgtcttggagttctttgcccaattagacaaaccttcttgaaattataggcattgtttttttgtctttgtttttgtttctcctaaagcagatgacacagtgctgtttatgttggccagcacccaataagcaaataatgggaaattgattattgattatttcctcattcccaagtgaaaaggagaaaggttagtatcaatgtattctttgttttctgaggaaatcgttgggaatcctggagggctttatgtgtgggtcatatagaaaatagttctgtatgacaaaaacgatagttttggtctcaaaagcttgggctgaaaccatggctccaccactcattagctgtgtgatcttgggcaagttatttaacttctctgagtctagtttccttaatggtaaaattggagtttactatacctgtgtctcaggaaggtcaagataaatactaaaaatattagacaaaacacgattgtcttcactaaaatctgtttggcctctgtacttgcttgataatttctgagtagaattcagtcatgttggtaaattaaagttatatcacaggtatggaaaaatggaccttaagtgctttaaaatgcagttccgggtggggcggggtggggggaacttttcaacagatttatcactgaaagagctgctttattgcaaaggagatgagaaatacagtatgcacactcaatcattccaccattactacaaattataacttattaaggaactactatgtgtgtggcagacattgtattgtctccacccacacaatagcgctgtaaggtaggttttgttattttccattttataatgacaaaacctcactttcttacagagtttaagccagacctgggttgaatctgccctgttacatattaccattgtttccttgtcctcatctataaaatagaaatcataacagtgtctctcacatattattatagtattataattataataatattatatagttactgccctgtaacttaaagtctagcttgcttcaagatgccagcttcctgaggacaggaagactgtctgtcttaccctctgctgtattcctagcacctatagctatgcccagatcagtttaggtatacccaagaaatgtttgtcaaataatactattgcaaaaataacagcgattaagtgccttacttgttgtaactgtacttgttcaattgagtctatctttctgttaaacttagctcctggtaaaaaggtgtgtctagttgcaaatcttatatataaagaaacattttcttttgtttttttcctattttcaaaatatctagtaaaatagagatctgtgtgagacagatgtgcactctttaacaggttatctccacatgaaaacagagaatttattaaatgaattaatatgtgtaaaatatttgggaagatatagatgtagtataactactgatttaagagtcaagtgaagccagctaatgaaaaaatccattgatttttttaaatgttccaatggtgccatacatgtttcataattcagttttaaaattacatcatcacatagatacctattttatcctttcttgcatgatatgacttggctaataccatcagagtgaaaattggggaaattccatgacaggattattattgttgattaatttggacccaaagtatagtttgctctgctcctatatgtcaaaatcctgcctccacataccatcttattggtgttgacttggacagcattctgcagcatgattgagcttaggatgcatttttgccagagctttaatatgaaccaacaagcatacaccttgataggaaattggcacctaaaggcacctggtggaaagtacctctgtggttagatgagtaaactccagcagtgaatagggatatccggttttttgtttatgaacataaagtggcaaacaaaacaattacaagccaagaaaagtctggaagtgtcctttcatctttgagaaaaaaaaaatcagttagcagagtacttacgcagtctttgtgcagtagcaattgccaaacacccctcacaatccagattttattacttgatttttcaccaacagagaacagcgatgtaacctccttctgatttttgtgccatatgaaacagtggtgtttacagtattgaggaggaagtttctcagagttcagtcctattgcagcttgcatggaataatttgggatcttacttgtttatgtgaatattcacagattcctttagaataatgggactttccattgaaaaaaatgtaatgtgaatttccagtgatttattgatttgttttatactctgtccagttagaattctttggaagtggaatcagtccagagacggttattgagcatctactatgtgccaggcaccattcctagcactagggatacagtgatgggcaaagcagaccaggcacctagctttttggagctcaaattctactggggaagacagatcacacacatgtaaacaaagaaatagtataatttcagataggcataaaactaacatttgagctcagacttaaattgcgggaaatggtcagcttcactaacgcctggaggaaaagaggcagggggcctctctcagcatcttgagctcaaggtgtaaagagaaccacgaagagaatagcacacaggatgctgatcagatgcataaatatatttaatatttattctaaagacaaagaggtcatattccctactcccatctctaaatctaattatcaaatggctcctggttggcatgctttcatattgcagaggtgttttattttttcaagatcattttgtttagtggcacaggtgtgaaagttaagagtctaaatagacatgaagctcttaaaataagaaataaactgaataacgtcattaggattaccttctttatttccaccagttcacaggtgcaacaaggttctatgggctaagcataagaagaatgtaaatgttggtcaatttctcaaacactgcagattacatttagaagttatttgaaggccatttgatcagccaaacacagcacagacacccttgagcacctgcaaggttagaagcacatggctagcctctgttcttgtccctgaggaatctacttgctctcaaatcatgtgtttaaaatgaaacagagctggagtctgtgtgatgaacttccttgggttttacctgcccagcaaccaagatcttgtcttctgattgctgagtggttcacataggctaatctcaccctacaaggcaaagcccatgatttaggaccaatccacacattccttcctcttggctaaagttgagtgcatccacctgggatgaactcatgttccaggttagtcagatcagagtgaatgtggagacttttgctggagcaactaggaaacagaagactctttcccctgggaaggttacttgaggcccttgatttgctggggccaccaagtagagaaggctggcctcacggcaaagccagcacaaaggagagcaaaactaaaagaggagatggaggacagggaagagaagggaatgtcagatcctcatgccatcgttcagggccattcatccatctctggatttcctgtacatgagccaacaaattcctcatgttgcttattccactttgatctgagtttctcctcttgcgatttgaagaatactgactgatatagtcattctaacctatatattgctatttggattttatttatttttaatgataagaaacatcatccgggactaggaaagggtataatctttctggcctcaagcaatttaatggagcataattatgcatggacctagctagagatcccagtcctgaaatcaacagtattttatttctttatttttgttcattttacatagatgttctatccagtatgcttttcaaaaatatatttaattgttggtttggaggcataatgtggtggctacacacgtgggctccagattaggttgccaccttcattttttcacttttcagctgtgtgagcctctctgaagattcttttttaaattgggggaagcaatatttacctcgtagcgttattgtaaggattaagtaggataatataagtcagttacttagcacagtgctggcagagggtaggctcttatttaaattagctcttattattattcaattgataatatatggcccatctgatgtcacgtgctttaatctggtattatttgtgtttatcacatatgcttccttcacaaatcaaccacaagctatctgttactttgtctttccctttaggtatctctattggagatgaacgcatgttcaatacacgtggcctgcctgagtcattagcaaagtgtccaacaactctgaggtactgaaaaatgaaatgactagttaatgtagattgagagtccacatgccagtcacatctcgtctcacttaaatctcccaccaaacttctaaaaaagatgcagccgagatcatgaaactcaggaggacaccaagtcacacagcactcagttgtgatttgaacccccggggatccctgactcctgagccatcacccttgttcacattgagactgcctgtatccctgcctttccacaaagaatattcataacttgtagggcttaaaatgcgcgcccatgacttggatatgaaaaagaataactattttctatgactggcttcatctggctgtgtaacccctattcctgttgtgccacccttgggtaaataccttggagtagaatagctggctcctcttgtggttgggtgtttagctgtttaagaaactcttgagctgtttcccaatgtgattgtaccttttcacattcctaccagcagcataggaaagttctgatccctctacatcctccccaacactccttgtgatcttctaaattttagccattctattaggtgcagagttctatttattgagtcagtttttatgttgtgatttttcaggaaatctgtccatttttttctaagacattgaatcattgacatataattgcttatcatatgtctttattatctttttaatgtctgttaaagctgtaattatatcccctctgttattcctgatattgtttttgtttgtatgtgtttctcttttctttttttctttcattagtcttaccttgggtttatctattatagtcatcttttcaaagatccgactttatgaaatttctctttgtttactatttcatagatttttgctatgatatttattacttcacttgttcattctgttttgctcttaagctcccaatatctggacactgttatggatatcttatcttgtatggttattgatttccaatttaattccagtgtaactggagaacatactcttaaagcttttaatcttttaaaatatattgagacttattttttcgatccagcacttagtttatctgggggaatatgccactgagcactgaaaatgaaaatgtattttgcagttgttgagtgtagtgttctacaattatcaactgggttgttttccatttattccttctgttgttgttggtactactgctgttagaatattgctctattcttgcctttttggagggggttaatcaaatctttaagcattccattttatttatttgattgtcttctttgctataactcttatttgtttatttttggttgtctagggcaaataatttgcattcagaatgtatcaaagtccatttagagtcaaaagatgtcatggccttcaacagtacaattctagttatgcatcccatttttttgtgtgttcttgttattatatcctttacttctacttacgttatagattccagcttacaatgctgtgaattttgctttagtccttttaagaaaattacaggaattacaggaagcataactttttatgtttagccatttattgaacctttctggtgctgctccctcccactgaagatccacttgatctttctttcagccagaagaacatctgttagcctttctgggactctcgtctgctttttcacttaatccagcagtttgggaacagcatcaggcctcttgttttgtttccagttgcatcctcttaacagcacgctctaagggtgctttatccaatattgtaaaaggaaactaaagcaagatttgttttgaggattgcttggtgcccctttaaaaaaattagacaccaacccaggaaaagagttggaaaaaagtaccccaaaattttcccatttacctaggctgtctttaagaccaatatcagtcaccagcaattaccttttgttcccagacaggaaaattgaatgactgcatcaacgctaaaaagcttggattgaatcagacactttcctcagaagtgaaaaatgcctgaccacaagccctagttaatttaaggccacttagatggcgactccaggagaattccaactcagtgccccaagatttctcagggacttggatttctccctaacctactggaaaagaatttgtcatcagcaaagctcttccgtagagaaacttgagataaaatgggtctttcaacagggctgtgattgtgtgaagggatataaactggcaagaattgtgctcctcattcttgatggaaggttaacatgattaggatctccagaagtctcatatagcaagattaaattctattttgcatactgaagtctcagatactcaaatttccactagcatgttagattctcagtgtgctccctttatgtgggaaatctgtaacaaccacaaggcacactcaatccttcctcaggcataggcacacccagacccacccacatgcgcacacacccatacgtccacacgtgcacccaggcacccgtgctgcatgccctcacatgcacagccccacatgcaagcacacctccatgcaactttcctcaccaacacgaacatgcacccacattacacacccatatctattcccccacatgcacctcttcccacagacacatcttccacacatgcatgccccccgcacttgtgatttaatggcacatatgattcagaatgtctgtgaagccatttccaacctgtttttgtaataacctgtgcttctcagtccaaaagatagtggaacgtatgtttccaggaaaatatgaaacaggaatttctcaatctcctagcagcatccccaccctgctgtactaatattagtccatgttgccaatagcagcagcccatgtcagactggctgcctctcctccccacctaatccccacttttcttgtttgtaattgaagaacaaccgactgtatctcatgctcgggctgaccaatgagtaagcaaaagtgttatgcggggagacagccttctaattctgcagacattattaaaataatccaacacaggtacccgtgcaatcaattttcagtttctaggatgagagatatgtcaccttgccttcaaaaggccaaacctggctcgcttcattggctcccttctcaatgtctgatacaggacccaaaaaggtctatgcatcctgtggcaagaaggtggcatcctcacaatctgggacctgactctggtgaaaagtgttgtttagggaacagatgcttgatctttttactttcgctgctcgccaccctttaagaggaaaatcttccccaaatctctcttcaaatcaaatgccggatgtcaatggttctaaactaaagctgagcccctagaatcacctgggcagtgttttgttttattaatgctgatttctagcccctacctgagacctactccatgagactgtctggagtctctatgagccagaatttggttaaagttacctgggaaatcgaggggaagccaggtttgggaatcactggccaatatggtgatgcctgtctagagcctggacttcacaacccagtgatgtcaaccacacttattccacccatcgtgcctcgagatgtgggtccacgtgcagggggggcctctgtgcatggtggtcagagagctcgccatccctctttgtgtgctcttacccagctctccaggcagtcaagggctaaagggagaggtaggtgggagctcccttgagcagaggggcctttgtagggtgatggaggctcaagagggaatttcctgccctgttctggagcttgggcccccagtcctgcctgaagtcccagggtccacagtggcacagatagagacagctttccggaccttggagaagaatctcagtaataaccgggggcagggcggggtgctaattaccaaaggacactcactccctacagagttctcctcccgaacacaacttgatggaaggtaaacacccacacaggacatttaaataatgcccaagccggaatgcgttgataaccagtggcgtggacattcggcagctttccatttccagaacatactcgactgtggagaaaagacgatggtagctacctgagggccttagcatttgagccctggtaggtgagggaatctgtcagagtgaataataaactcagtactcccaaagaccacagcctcccttaatggtgtactccataaaccctcctgatttttttgcaagaattccacttgctctctagttctgctacttacattttccataggtagtggttaagaccagaatgagagaaacctgcttttaaggtatgagactgggcaagtgagcccatctttcttagacacaattttggcttctgtgaaatggctgtacttacttcatagaattgcttcaggaattaaataagatcatgaatataaagcatgaatatacagcatcaataaatattggcacataaatatcagtaaattactaatggtaaattactaaaaattaaattaactgaagccagagaaaagggaattccttagtttcataagaaatgtttatggtagatgttttgagaaggttaatttgtggtggaaattttggccaggtggcatttttatatgtataattttataccataattatatgtatatgtctttagaaccctccatcatgagagaagaagagaagattacttttgtgtgtgtgtgtgtgtgtgtgtgtgtgtgtgacagagtctcactctgttgccgaggctggagtgcagtggtgcaatctcggctcactgcagcctctgcctcccgggttcaagtgattctcgtgcctcagcctcccgagtagctgggattacaggcgtgcgccacaaagcctagctaatttttatatttttagtagagacagggtttcactatgttggccaggctgttcttgaactccttgcctcatgcagtcctcccgcctcggcttcccaaagtgctgggattacaggcgtgagccaccgcgcccagcctaaaagattactgaagggaatatttatataatatcttgaaaagcatgcacctagaagcaacttccaagggtcacagccacctggttagctttagagaaaaaagtgcctaaggtgttacattttcaaggatgtttgaagaatgtgagtggaattttctatgcagtttcacagggagagcaattatttgggtgtccttcagaattcaacactacatctctctcagtccatcctaatttaaggcactttccctgctgcataacttcattcatgttagttctgcttctagtggaaatggggaattcatatataatagtatttctaatgtttaggtttaattttttaaagttgtgaatttccaagctctcaccatctccttagatcttcacaagtcatgacatatataccaggttgaccaccattttacaaataagaaaattctgagagcagagaatttaaatcctgtctttattcagctcttaccataatcccccattttccatcttgagtatagtgtctttccatacctttgttgattattgagttttccttacatttagatgacaaatacgactccaaaatacacatttatcttgagtccttcgctgaccaacatttgaacctacagtatttagagaaatcctaaaacagacatttgcactaattccagaagctgaaggggctcaaaactccgggctctcagctctccagtggctagagatcatgtgactaacctcagccaatcccatgctctgtctggaggtgttcagtgtgcaaagaaacattgcagacttcagatacatttggtggcagcagccacagaattcagcgtccaatgccagcagtctgttattgcttgtaatagtgtccatgaatatgaatcaaaccagactttccctttggtataattttggccacagtttggctgcctaatttccctagatgcctgcttatttattcaggcctggttgtccagccttcttatcaattctacggactccccaatatccatcaacaaattccattgctgcataaccacgaaagacatctgttcttcataaacaagaaatgcggccatcgcaaccacatgataaataaaagaggcggtattcttcccagatgtttcagggcatcttctcttaaaccttcagagggtcctgagctgctcatttccgggacttgctgagccctgacagtaaacagacttttaacaaagactcgctaaatgttcagattttttttttttaaattaataagagaatggtccattttcttttcaaatcttaacacagagctggcaggatgtcccccatagagttcagagtcagaagttgtttttgatgcgccgacattccgtttgtgatagtcttgcctctatccggcacttcttaggcctcatctccttggcctggtttgtgcagtggttaaaaggggttgatttaatccagaccacctgagtttaaatctaactttccagctttctggctacacaaccttgggcaaattgctcagtatctctgtgtctgtttcttcatctataaaatatatagattttgataatacctacatcctaaggctatgaaaatggttaaatgagttaattcatataaagcatgtagaacagtgcctggctggtagtaaatacactgtaaatgtcgtctattaacatattatcctcacctctgatgcatacttgctcacttaccttttcttttctcaaaaccacctctcataaaataatctgaaattccttattgatctcattcaaaatctgtttctctcacaggcgtatcctcaaatgaagccttgtctctgtgaaattcctggtaagagaagttgaggcatcaatagtggatcaggaggtatttttaggggaagaggagtctcagtattcatggaactcaatgagacctccacctacacaaggccaaggctgcatatggatgtagagaaataaaactcagatgttgaaaagtatctgaagagatgatagcaaagggaaattatcttttatctttcagataaatcgtcattttatggaatgccacaggaagaagttttctttacaagttctgaagacttgtgatgaatgagtccatagtttcacctttgaaaatgtccctgggagtgtcaaccccatcacttttacttatattacactcataatcagttcatctcgccaagaaaaataatattatcctcatgcccaaacttgtgacttgatttgaaaaccagtaaatcagaaataaaacttcccatgtgtttttttcctacatgaatccaagtgactcagatattgtgttattcaataagactattaccatgactcaggtaaaagggccgtttatattttctgaagtctcaagtctagggtccaaaataaaactagcatcttttatagaataatttttctctaaaatgaaatgtgtatgtcacctggttgtcaaaatccttatttaaatctttaaggagaaaagcaatggtttggagagtggacttaagcaattgaatcttggattcaaatcatagctccagattgtatcagcctctataactaagagcaggtggcattacctttcccagtcttggctttcttattggtgaaagaaaaaaaagagaatattaccagtcttgaaatgttgttgcgtgtattcctacttagcagggtgcctggcacatatatgcaggtaatataaggctctgcttcgcttctggccaaaacttcctggcacaggaggacatggttctcagatgtgagaacatgttctgtcttctgcaggaaaccagaaggggttctcccttctttgattgcaggaggaaagaattctaatggaatccatatgttctttggccccatttaaaactccacactctggaaaagtagatggtgtcctggagtgaatcccaaagtcaggcccactggaaagggtcactgggctttctcctgcttcagtggcctgggattttaaaagttggaaaagtttatccatacaactttattggaaatgattgttttttattctattcttgcccttttatggtataaagtctttgcttttatgttgttaattttagatttaggcttctttgatttcattcacttccttaacaaagtaaaaagttggcaactctttgaagttgctgcaaccatattcccaactacagcatccttctatgagcctctgctctcttaatgggtatagcccaagggctagaaatagaccaattcttggccaggcgcggtggctcacgcctgtaatcccagcattttgggaggccaaggtgggtagatcacgaggtcaggcgttggacaccagcctgaccaacatagtgaaaccccgtctctactaaaaatacaaaaattagctgggcgtggtggcacatgcctgtaatcccagctacctgggaggctgaggcaggagaattgcttcaacctggaaggtggaggttgcagtgagctgagactgcgccactgcactccagctccggcaacagtgcgagactctgtctcagaaaaaaaaaaatagaccaattctttttctctaatcaggtaaaatgaacaaggatattttattttaattttttaaagacaaagtcttgctctgttgcccaggctgcagtgcagtggcatgatcatagctcactgcagcctcgaacacctgagttcaagcaattctcctgcctcagccaacggagtagctgggactataggggcgtgccaccatgcttgctaattttaaaaatatatgtatttttggtagagatggtgtttccctatgttgccgatgttggtcttgaactcttggcctaagcaatccctcccaccttggcctcccaaagcgctgagattccagacgtgagccaccatgtttggccccaggaaatttataactaggacaataaatgaaggcacaagagaccaatcccagttgttctatcctctactattctgtcaaccaactttcaagaaactaacattcgtgacatttataagatggtggcctctgctgcatgccaatcttgtgaagtacacacaggggcatgccaggtataagacagtaattacagtctccaacacagaacttcccggaatggaatcacggctcaaagaatcccacaaggaaagacaagcaagtgagcgtgaaaagccagatgtgaaaggcagcagaaatgcttcacgtgaagtaagtaacttatggaagctctagaaaagcaggaagggattaaacatgcattgattacgatatgctaaatgggctgggcgtggtggctcacgcctgtaatcccagcactttgggaggccaaggcgggcaggtcacgaggtcaggagatcgagaccatcctggctaacacagtgaaaccccatctctactgaaaatacaaaaaatcagccttttactcctaagcactgatttgggatttgagaaaaattttacaaaaaatcagacttttactcctaagcactgatttgggatttgagaaaaatccagctcatccgtctgatctggcctcttgatctcagaagctaggggagaccatttttgctccacacataactaaagccaatagaggaaggtggtttgcagaggtaaagaggattgaagcagttgagcagacagcacagaggagaaatgaggcaaaggtctgatgtcctaatggtttccatctgcaatctcttccaaaggcactttctgatcaagtagcaatttggactttttttagttgtaagcaacagaaactggcccggctatcctcatccataaagattgtattgcattcaaaggcttgcaaaagtgtggctagatgatcaagcttggggtgtggggaggattccaaaacggaaacccaccactgatgcatggccagaaccccccaccagaggatcctgctgtgaagaattaagagccgtggatccatcgacgccaggtcatctacccaccctctggctgctggcagtgggaagagcgagttggtgcccttccacttctgtagttgatactggggtcctgattgctaccggggtgctctggttatatatcacactccagacttggtggtgtgaaacaataacagtcttttattattatcatacctcatcatgctgggagatgactctcatctcctcactgaggtttcctgtgcagttgcagagagttggtgaccggggctagattcaccttaagtcttcctcactcaagtctggcagttgatactggctgagagctggggtctcagcagggaccattgattggaacactgctgggtgcctggacttccttgcagcacaaaaggtgggcaccaagggttaatgcccccagagagaacaaggtaaaactagattacctcttctagcccaaccttggaagtcatatggcaacttctgcttctgctgcacttttttggttagaggggactcaccagataagtccatattcaaaggaagggaagtaggcttttgatgggaggatatcaaagaatttgcagaaatgttttaaaagtacaattgcctcaacacgaaggaatctacttgatttcctaaaactagaatcctggttgctaaaggttccataagacaccccatatattgcttagcaaatcaccattcattgtttaaagtagttcaaattagtttcaatttcttgcaggcaaagacacccaacggaagcattggattccaagacattgaattccttgaaaggagagatttaaaagtacctagaatacaaccttccatatgacatttattaaaattggacaactatactttgagaaaatgattgatatgaattacagtgtgattgacctatggtctcagatccaaaccgtaaaccctacacattcccacggctaatcgttttaggaatagaccaatccccagatagtaagtgaagactcaatggattttggaagtcagtttggcacaaagaccctggaacagcttccggggctagaggtggagtttcctgttgctgaggtggaagatcacgagacaatcaagaaacatgcctcttccatggcttgaggtcaagtctaagcttgctcagtatctgttactctctgattgaacttccctttaattctcccatcagccaagctttgtctctgaggtcttataggaagtttttggcaaagtggcagaggtggtgaaggacatcatgaaaaacctggagccaatgaagcagaaagacttattctggaatacatggtgtggcatcctagaaaactctagatatgacaggtaaaaacctgtggagggaagagcgcgttaacattcaacattgaagtaagttaacctcaacgaatggttgtttggttgacaaaaaatagacccaaacagagtgatattcagccagtatcattcaaatacctgtgggttatctgaacaacattcttgctttcaatttcttaatgctcaaattgcttagacattttttctttcccaaacaggtgggtaaatctaacttttttggtgtctctcttggacatcccagttaatgctgatagttaaatttatactagacaatcccataggaagctgcccctcagagatccgcctgcttcctggagacacttctgacattcttcaaaattgccagataacatttgaatagctctgcgttagaatagccaataacccctgcattagaatagccaatgtaatcactgattcttcagctgcactccagagccttagggaataagttgcatgaaaaattttatgtgtatataatatataattatatatatatcatctacatatatttatataatatataattattattttatctacatatatttatataatataaatatataaacattagtttatatagttatagagaacagagggcatagcatgggtgagtgcccccagagagaataaggatggaacaaatatataataaatatctatatttatatatataaacaaatggaacaaatatatataaatattatatgtgtatatgtatatataataaatatatattttagatatttatgtatacattacatatataaatatatatatacatatagtgaatcaaactcgctatagcgagtgctcatgctgtgaaagatatctgggaaagagactgatggagggaaccgtatacaccccaggctagactctaagctttttgagtgtgggtgtcatatctgttttgtttgccagtgtatgcccagaacctagcacagtaagtgacacctagatgacaggacggactttgcaggcatgcagcccgtgtggtcacacagggtcctgcactcagaagatccctgcacatgactcagtgctctactgttgccatcctgaaattgttaatagtgtttgaacaagaggccttgggttttcgttctgcactgggcctcacagtctgtggttgctcctgatgacattcaataactatgtgttgcatgaatgagtcagaggccaaggccaggattatgttcctaccctacccttaaactctgggtcaaggtgagagtgttcctttaccggaatcgaaggttcgtctctcttgctctcatttgctgttttcaggctgatttttccagcaatgagtaacagcaggggccatccgtttacttcaagggaaaactctcctccccatgtgcagctggtctgacccggttctgcagcaggacaatttgccaagactttgatgcagaaaattcccttaaggggacttatttggtcgtaagtatcgtgtgtgaaagacatcaatatttaagtcctggttgggcttcatcagattcaaccctgttcttgtccagttttatcaaaatgtataaagtctaatcttagggaacaaatgtgcagtgatgctaatgaattttaatagcattggacgtctttgatgccttgtcttatgtcctcctgacctatcttgttgctctggcattaagttgacaaacagctgtggccaggtgaacctgacctcagtagtacctcatgtcctggggcttttctactggccacaggcagcacctgcagccatctagcgcaagaccaaacctgaaagtgcaggagaggtaacacctaccggggcaacccttggctgaatggggctgggtggataaatgctgtctctgtagtgaggacagttctgagggacaggtgctggagaccagagggtttgcaggaggagcaagctccagcggcccacagggtcatcagcccagtggcagcccttggaacagcttcctatcttcacctttttcacgtttcctccagcttccccagatcccttcccaccatgaactccctgcagcaagccctcgtctcaggctctgtccagacgttaatgtagccgtgacgcatcagtgagcactcttttgattttaagtgacagataactaaaccaaactttcctaagcaaatgaattcaatgactcaagtcattgaaaagttcaaggggacagctagctgagctctcagtgtgactaggggaatgctttctatcaggccctgttttatctctccctgttcctcagtttcacttctgtgttggttccgtttttaaatgagttcgctcctgatatggcaagataccagccactatgccagaactgccatttctacagcttcacagcaaataggaagagagggcttctggctcccattggaatcagaagttgaggctctgattggcctcagtttggttctgtgcttattcctgaacagtcatgtgaccatgagttgctgaatggctgacggctgttctcaggctccaccactaaggtggtatgacagtccacccagatcacatggactgatagggaggaaggggagggtcctcacattgaaatcagggctattgccagaagagcacgaaatgggtgtcgggaggcaagcaccacatgttcaggagaactaattcttcttgggcagccaatcaaatgtggagtctgataaatacaattttgcttcccattccccatcagcaaagagattattacaaaataaagtctgtaatgatgagttacagttggatataaacctattaaaataatgcattatatagattaattccctatgtatgcattattcaagtgcttttaatacagttccccccctttggggagtgggatcttaaaataaaaaggagaaaagttttcattgctatgttgtcctatatatcttgtcaaattatgcaaaaaatacatgtagacttgtttcacaaacataactagatagcataattacttgggtggtactaaaatttgtttgaacaaagttagttctaaaggaagtgaggcaggattctttttgagaagtataatatttaatttttatgggtatgggaaaatacagtgtagatgagaataactacgatttgtatccttattttatcagataacagttatataaggtatagaaacttagaggcattacccaattgtcctgagcctcctttcaccacctacaaaatgaaaattatacctatagtttgaactgaattaatttgcaaaattaatttaagaacccaaagtatatattaaatgcttaagagaaatacagcctctttttaaggccattgacaatttagggactgcccctcctcctcatgtcttcgcagacagcttttccggagcttagcaagtggtagctcgcaaagtactgaaatcttctcctaggatccatgtcctacactgctacaagaatcactgattacattggcaattcaacatttattaggtcaaatggaatccatcgtagccaggacctcagctctccttcagtatgctcagataacacctgaccgaatatgggaagaggctcattgtgtaaacacaaacgtggaagtgccttttattaaaacaagattttacctgtagaaagatttgagcattcaatttgcctcgaggtagcatctttacctggaaatgaaatctcattctgttattggagccaatgtgtttatgtcaccattggatgcaggaacaacttaaaaaataatagtatacatatgttatgattaactctaaacttttgtttactttaaggataagctaaaaaaactcactattgtcaaaaatagcttctgtaatttgttcttttcacaagaagtaaaattcttgtgttattttttattctctgtaccttgcgaataactcataacttaggagttcccaagttatgttcattcctccattgcaatctctgtcccacccttccctttctttccatttccgttgcaatgtaatgtaaggttaagagcatggaatgcaagaggtgccagtttcaactctagctctactgtttctagctctgtgtcctcgagcacattatgtcccgtactcttgcctcagttataccatctgtgtgtaataatgataatactacctcctttatagggttggttaactaatggtctgttttataaaggtctaaaaacattgtatacgttgaagggcttttaaaaatgctgtacttttagccaggtaaaaattcggttaagaattcaaactagcaaaagatgattctactttggcccaaaggcagtggtttcctgggtttgtgtcatcttgctttgcagcgtgtagacaattcttcaggagttgcagagagaaaaataacatgccagattttggggtcacagtgccatctgctgaagaaaggagtgttgctcgaacaatgagtccacatgatcacaatttgcgtaagtactaggcctagccaaaaaacaaaacaaaacaaaacaaaaagaatgcaataagttatggactcttgtacattgtagtggagtgaattcctcaacagcttacgctgtattatatattactgtattaatctctaaatacattatcacttatttattcatgcattgatttattcattagttaacatttgttaagcacctactttcctgttggtgccgcaacaacagagatgaagaaaacaggcatgatctgtttcctttggtgctctcagtttaacagggacacagaattcaaaagggaatataccagggaggcgtagaaagctgctttagggggcagcggatgctgctcttgtctgggagatgggtgcgtttgaggaaagcttgtgtcttagtcagtctatgctgctacaactaaagtcctgagtctaggtaatttataaacaatagagatttattcctgacagttctggaggctggaaaatccaagatcaaggcacctgtaggtttaatggctggtgagaggtccagtctctccttctaagatgccaacttgttgctgtgtcctctgcagggcagaatgctatgtccttacatggtagaagaacagaagagaatgaaccttgatatggtttggctgtgtcctcacccaaaatctcatcttgaattgtaatccccataatctccatgtgtcaagggaaagaccaggtggagataattgaatcaagggggcggtttcgcctactctgttttcgtgatagtgagtgagttctcacgaggtctgatggttttgtgtttggtagttcttcctgcatttattcttgatcttgccgccctgttaagaaggtgccttgctttcccttcacctcccgccatgattgtaaggttcctgaggcctccccagccatgtggaactgcgagtcaattaaacctctttcctttctaaattacccagtgttgggcagttctttatagcagtgggagaatggaccaacacaaactcgttccctcaagcccttctataagagacccaatcccattcttgagggctctgtcctcagacttaaagacccccgcctcattgtaaaaccacattggccattaaatttcaactacgaactctggaggacacattcaaatcatagcagcttccttgatgggagtaacatagacgctgagtcttaaggataggcagacggtagaatgcagctggctgaacaataggagaaaggcatcataggcagcaggaaaagcaagtgcaaaggccctgaggcaggagggagcgtgtagcattcacagaatggaggcccaagagggtgaagcacagtgagtgaggggaaagatggtccaaaacaaggtcagggagggaggctaggccctggtaagaaatttaagtgcaatgggaaaacaatgaaacatttcaaacagcgttatggaaaaaccatttgcaaaattgtttagctaaatacaaactgacagtacttaacattacccagcacagtaagattcaaaagaagtgcaaaatattcggaaggtggatttgaatgatttaagtctggggaacactgtcatgttcctcgggtgccctctgcaggcgccaaaccaaattgctgcgtgatcctggggatttgctccttcttgcctctcactcctcatggccagcatggaagaggaatctgatcaaggtttcctttttaaatcttagaaccaggagcctggagcaggtgttgcaggttttggagggcacccaggtgcgtactgccaggaaatgatgtgataacctcattctcgctttgtgacaaaatctaaattaaactgggacatgtctggacaattttgtagcttacataccaattcaaacaggttttttttttctcttcattttccagtcaatatactgaccatttctgtccttatatcttcctcacggagtgttcctgatggtagtcacacagtcttttattataattttatgagttcttgttggagcgattaatagcatttatactaataaaactttctaacatactgtataatttacttatatgttttggttatgatctttttcctatcaatagaatgtaagctacatgaggacaaagagttttgtctgttttttcagtgttatgccctcaatgctgagcacctgcccttcttggtccaagcaacatcccactgattccacagtcctcagggaccactccagcaagattcaagctctttctcccctggactcgccccagggttgcagcttctggtgctgtgactttggtcatatgtttgccaaccataagcttcatgatgccaagcaccttgtctgctttatttttctgcttgcaatagcacctagcatggtagaaatttcaaacaaacacacgcataaatgctctcatttaggtatgttaaaacagaaggctgggagttacaagttcatatacctggagggcctcacaggtgagcacatggatgggcaggtgccctacatgtacctgtgtgcgctctgtgagtgggggggtctgccaggcccaggagagagcctgctggccgaatgtgccaggccaaagcagcaccagcagctgcccatcaggcagaaacacaggtgcaatgtcaccaggatgctgattgtaccagctcaagcaaaactaaaaatctcaaatattggttccactaaagaaaaataccatatgggtcaaagaaaacatagcctggatccagtcagtgggaggccagttttcaacctggcataagggaaagtctttccaaatggtcattgttgattctcctccctgacctgcaggatccacatgcttccacttgtaccccatgcttctccccggagagccagggacagtccccagctggagaaaggaccagaaacaaaggtcggaaatgctccacatcaggaaatgagaagatgctcagcagacttgaaagtccctgtaccatgcggacttgcagaacgagtttttctgctaggagagagattagctcaaaggatagcaaggtctggggagaggagagggacaagaatgatgagaaatagaatgagaaggaaaacctctaaagcaaggggaagataggggcatcagagggagctgagtcagcaccaagactgccaggagccgccactgtcctctgtccagattcaatgacactgccctgtgcccgcagactctctgcccagtgccttttctctctgcttttgtatggtctgtgtggggaactaatgcatggagaagcgtgcaccatctcatgataatgatggagcagccaaagcctcatagagcatccgattggagccatggcttctttgagcccagccaaagggatccagcccctacctccatatcacctgttagaggagacagtgccccctagcccttctgtctctggagcccctgtctcctggtgcaatttctcagctcagtgactagctaaccaggcacttggacattaaggaagcatggtgatgaataagtgggccctgcatgaggcaggcttctcagggtttcttggcagcacatgtattagcatttggaccaatctgattttattttattattgttatttacatttatgtatttatttttaatgttgtgggtacacagtaggcataaatatttatggggtacctgagatattttgatatgggcatacaatgtgtaataatcacatcaggggccgggtaccgtggctcacacctgtaatcccagcactttgggaggccaaggcagatggatcagctgaggttggagtttgagaccagcctgaccaacatggcaaaaccccgcctctactaaaaatacaaaattcactgggtgtggtggcgcaagcctgtaatctcaactactcgggaggctgaggcaggagaatcccttgaacccgggaggtggaggttgtggtgagccaagatcacgccattgcactccagcctgagcaacaagagcaaaactctgtctcaaaaaaaaaaaaaaaaatcacatcagggtaaatagtgcatccatcacctcaggcatttatcctttgtgttacaaacaactcggttacactcttttagttattttaaaatgtacaataaattattgttgactgtagtcaccctgttgtgctatcaaatattagatctcattcattctagatgactaatttttatacccattaaccattcccacttccccgtcccctagtacccttttcagcctctggtaaccatcctactctccatttccatgggttcagttgttttaaggcttttagctcccacaaatcagtgagaacacgcaacatctgtctttttgtgcctagcttatttcacctaacataatgtcttccagttttatccatgttatagcaaatgacaggctctcattctttcttttttttatggctgaatagtactccgttgtgtataggtgccacattttcttttgtattttcattttactttaagttctgggatacatgtgcagaacgtgcaggtttgttacataggtatatgtgccatggtggtttgctgcacccatcaaccttcatctaggttttaagccctgcatgcattaggtatttgttctaatgctatccctccccttgccccctacccctgacaggccctggtgtgtgatgttcccctctctgtgtccatgtgttctcattgttcaactcccacttacgagtgagaatgtgtggcattttgttttctgttcctgtgttactttgctgagaattatggcttccagtttaatccatgtccctgcaaaggacatgatctcattcttttttatggctgcatagtatttcatggtgtgtatgtgccacattttctttatccagtctatcattgatgggcatttgggttggttccaagtctttgctattgtaaattgtgctgcaataaacatatctgtgcatgtgtctttatagtagaatgatttataatcctttgagtatatacccagtaatgggattgctgggtcaaatggtatttctggttctagatccttcaggaatcaccacactttcttccataatggttgaactaatttacactcccaccaactctttatccattcgtctgttgatggacacttaggttgtttctgaatcttggctattgtgaatagcgctgcaataaacatgggaatgcagacatctcttcgatatactgatttccttattgggggttatatacctagcagtgcaattgctggattatgtggtagctctatttttagttttttgaggaagctctctactgttctttgcagtggttgtactaatttacattcccaccaacagcgtatgagggttcccttttctccacatcctctctggcatttgttattgtctgtcttttggaaaaagcaatttttagctgggatgagctgatatctcattggagtttggatttgcatttctctgatgttcagtgatgtcgagcaccttttcatatctccatttgccatttgtatgcctgctttagaagaatgtctattcagatcttttgcccatttttaaactggactattagtttttttcctattgagttgtttgtgctcctcatatactctggctgttaatcccttttttcttgccttatttcttaattaaatattaaactaaatatttagtttgcaaatattttctctcattctgtggtttgtccaatgtaattttaaagtcctaaaagaatttaattcactgactcttcagtatgttataacctgaacttcttggctgattttatgggcctcagtgttagacagcacctaaggatgtgtcatgttaaagcctcttggtttaacctgtctttgttctcacctgccattggccacctgctccaccccagcagctcccacagtgaccagctccacaccggccatggtgtgcagacttgcagggctgcctctccgtccagttggctcgtgcttacagcctcacaccttgttcctccacctgggggcttccctgtggaaggctgaggtgagaaaaattatgggagcctcaatgagcaacctggaagtgtctgggagtgaggtccccgtggggccagcctttgaatgggaggcaggaactggcaaataagagttctccccagctgaactctcctgtgttctggttaacacagcctcttacaggacagtccccagagagggagcaaccagtcgtgcttgataccaagcaaaggtcggcttggtgaggcctcctggtatgggctctgctgccttccctgacctgcttcattccgctttttcctcgctctggctgccctgggattgtactccttaatgaagaagcagtatctaggcctttgccttggggtctgctttaaagattccggctgggatggcttctaaccattgtcattcttctcccccaggatgctttccaatttctacacatctgaaatggatgctacagtctcaaaaggcagcactaatcatggccatgggggtagttagcagtaataccaagccaggggagttcttgaagaggagatttgaaagatcataacttgggcagtggaatttcagacgcaactgggctgaactgagaaagtaatcatagctaacatttcctgagagcttacaatgcattttatttgcacgtattatctcttctactctttgcaacaagcctattagagacacattattatttttgccatgaaagtaacttgtctaacatcaaaattagaaagtggtgcaggtatgatttgaacgcaggcagtctggctccagtaagccctttattgagtcttaaacactttactcatgcaagtcaggtgacaggagctgcaatgtccactatgagctgcccactcggggacacatctgactttatacatgacttgtggtgatgggtaaagcctggtgcttaggagagtggtctctggagccaggttcaccaagagttcgaacccaggctctggtacttcctggctgctggagccttggccaagtagctttgtcctcctgaaactctatttcctctcctgtaaaatgatcgataacaatattgtgtggtatggtgaggattaaaacatttagcaaggtgcaggccacatagtatgtaccctgtcagttttgtatgttactgttactattgcattagtccgttttcacattgctgataaagacatacccaagactgggtaatttataaagaaaaagagatttgatggactcacagttccacgtggctggggaggcctcaccatcatggtggaaggcaaaaggcgcatcttacgtggtggccgacaggagagaatgagacgagagaaaggggaaaccccttataaaaccatcggatctcatgagacttattcactaccatgagaacagaatagaggaaaccgcccccatgattcaattatctcccaccaggtccctcccacaacacatggaaattatgggagctaccattcaagaggagatttgggtgggaacacagccaaaccatatgaactctcattattattatacttcagcaaaaggcaaaggttaacgtaggtgagagtttaggtcccttctggtcctaagatctatgcacctgaggattgaagtgcttctctctctcaaagcccctatgctactttcggtccccaccatacaattacatttcctcaaaattcctgctccgctgttcctcagctttcaactcagccatttctcaataaagctttgaaaaagtcagaattctttctctctttctctctctccctcccccagtttggcctcaccaagttctaaaacatgcccagatctggcccctgccttgcaccccagcctcgctccatgctgctctgtcctttctaccatgtctcaccaggctctttccctctcagccctccacccctggggtccactttcgtctcctctccccatgctgaggcctcccattttctcttagcttagaggccagctccagagctggcccccacccctcccctctgtgctctgcctcagcacctcatttatctccttcatgcacttggtaccatttgtgacaattttgccctttatttctgtctccctctccaccatttgtttcttgcagtgcttttacattgagctctggaataaacagatatcactgatggagcatctcctatgtgccagacccggtgctaagatttaaccctggaaaaacatctttattcaacaaatacttttttgagcacatatgagctacacactggaaagtcccaatactaagggcctggagagcccagaataggcaggagaacaggcgatgcccgtggcgggctaggtggttcggtggggagggcacagggtgctataaggtctcattcccctcatttaaccaaagaggaaattgggactttgagaaaggaggaggcttgtcaggggcagttctcaagctgtggcccatgaacctcgggggtccctgagaccttttcagggatccatgagggcctccctttcccaactacatgatttgtatgaggctggggtttttcatacctacaactaggcaactaaacagtgtatttggagagactgaatgcagaagtagacatgagaatgtaaccttccattaagcctgatattaaagagatcagtgaaaatgtaaaatgatgacaatcttctcaatttatttttgtcttagaaaatatagttatttttaaagtgtgatttttattaccatggaatggagttttatattattttaaatgaattaataaatacattttaaaaattctgctttaatttctaatacagcaaatatcgataaataacccacataaacaaaagttctttggagtcctcagtaatttccaggagtataaagaggtcctaaggcaaaaaaaaaaaaaaaaattactaattgggagacacaagtgtcagaatatacagtaattgttcagtaatattgctgtaaattaattaataggattgcctagtcacaacagcaaaggcatggaatcaacccagatgcccatcagtggtggataggataaagaaaatgtggtccatatacaccatggaatactatgcagccataaaaaagaacaaaatcatgtcctttgcagcaacatggatgcagctggacatcattatcctaagtgaattaacacagaaacagaaaaccaaccactcatgttcccacttatgagtgacagctaaacactgggtactcgtggacataaaggtgggaacaataaatgctacggattccaaaaacggggaaggaggcaggggaaaggggttgaaaaattacctgtggggtactatgttcactacttgggcaacgggatcattagaaacccaaaccttagcaccatgcagtatatccatgtaataaaccggcacacataccccccgaatttaaattaaaaaaaaattacattaaaagataggagtacctcctttacaccacctgaattatcatggcacataaatctcacaccctatttgccaaggccattcgttcctagctgttttacaggtaggttagctttctcaatgcaagtctgtgggacggatggagaaaaattccccgagccctttgatcctgccccagctgggccccgccgcgctgagccttgggcgcgccccctgctgcccgcggccggagccgttcgccacacccccgtgtttatgtcggtccacgggggttgcctgtccctttaattggcatgtaccaagtccttccaggtcacatttcctccctacgtcccagccgtttggactcactggccaaaagtccaagaggacggaatgtggagacagtgttgtatttttgcggggagttctaggccgaccgggagcgagagaacgctcgggggcgaagcgcgccattgcggccctccccgccgcctgcggtagtccagtcccaagatggcggccaccatgaagaaggcggtgagtggggagctcggggctctggatgctcgggcggcgccggatctcggccgctggggcccgggcgcgggatgctgggggtgcgcagctccgaagcccggcgtgggacccgaggccgaggccgaggccctgagagcggtcccgcggcaaggcctgctcgcgcctggcgccctgagcgttttcctaggcacctggccagccgaggcggggcgccggggctggggccgggagcctcgaaggacgcaggtccgcctcccgcgatgccgagggtgcccccggggagtctgaggaacctgcagccccggcctcgcccctgaggtgtgggaagccgaaggtcccgttgagtgtggttggccttgactcgggcgttgcaccggcatgatcgcattagcctcactggttatgggtagctgctgctgggagcgtggttacgggtgaggaaactgaggcccagagatggggagtcacctgcccgaggttacgcagctcataacggggacagcaggttcctgcatccccagattagcaggccccagagaccctgtgtccaacctggagctgcccatttccacgcttgatgcccctgagtccttcaggctaaaaccagtatttattgagaatggaagatgtgccgggcccagcagccggccgtttatctgttatcctccccgcaactcagcaagtgcaatgggttcctctccactttgcaggtagagaaacttagacacagagcagttagaggccctaaagtgactcagctagtaagaagcagagctggagttcaaactcaggtttgtttttgtttttctcaaagcacgcctgtgtaaccactaagccggctaaacttccatgtggggtttttaatcccgtgagccttcccagatgtgtaaagatagtcagatagaagaaaaagaaaattggagagggggaaggagataacggctgataatttggggagctttacagtgtgctaggtacagctgtaagttgttttgcgtgtattgtttattttatgttctttgagggagatactgtttttatccttatttaacaatgagaaaacaggcgcggaggcaaagctagcatttaaacacaggcattctgactccggagtctgtgttttaaactgctatagggggtctttgatgagaatctcttggctggagggatttgcgttcattccacttttaagaccacattagaacttctttgctttgcccctatccagtaccacatagtctatgccatctgtgcctggtgtagggtgacccattgcccccttttatatgaaattgagggactgccaaaaatgggaaagccccagccaactcaggatgtgttgctcaccctactattctgccatccaaaaattcttactgtgtcccagagtagggtctagggccatggtgattcaaaaaagtatgaaactttgtgagattcacttcacctctagtttgttaaattgggccctctggtgttaggtatggcctttaattccttggaagatactagttgtggttcactccgttttataggtatggaaactgaagtgcagagaggtgaagtaaatggtagaagaggaaatggcagaagaatgatttgaaccttggattttgattgcaaaatttctaattaccaactttttttttcctttcattgattcagtaaattttcgggggcacgtaatatggcgtagtctcagttttaagtggagacaactgtggtgaccagtgagaaagctcttctccccttaatctcatagccccaaagaacgtatgttccagggcagagcaggcattactcagatagtcagacagaaaactagtttctctgatgagaactgtgaaggaaaagtgcttatgaaatgagggccaaaatgaggtctgttttgagatcagagaagactttcctgggaaagtgccatttaagttgagatctgtgagattatgtaaggaaaggaagggagagttggatagggagcgaagcattctagagaggagtatctgcagagactctgagtgcatttaatacaaggaaggcccgatggcagataatcaggggaagagagtttgagccatgatgggaaaagaacttatagaggggtaggtggtggccaaaatataaaggagcttctttaactttggaggctttaagagtcacatgatagatgcagtgtcctcctgtagatgtttccagtgttaggaacaattcccgatagattagcttgcatgtacacttttcccctttgccctcactaggagaaaacatatgtgtatgccagtgagtgagagtgaaacagagagagatagccctttgagtttaattaaaagcaaatcgtacaatctggagtactttacgtttgtaacacatcgtatctctcaactggtcatgactttgctggggagagtgtttagatgagatgattcagtcctctcctctctagagttctgccttctaagatccagttcttgaccataaggagatctgcactttgatttctgttcattatcctatatacaaatgtcctttcctcagagaggctacctttgacctttatctaaagaagcctccttcactccccaggcccccaaaactttctactcctaagctgttttattttcatcatcacgtttgtcaccattgaacattatcttgttcatcttgttttttgctctcttcctccaccaggatgtatgcttgccatttgtattcatgaaagtgggatagtggctctcttgtcacagtgcatggcgtataggaaacagtaattgttaaataaactactgcatggatgaaagttgaatacaaaaattagctgggcatgatggcgtttgcctataatcccagctactcgggaggctgaggcacgagaatcgcttgaacctgggaggcagaggtcgcagtgagccaagatcacaccactgcactccagcctggcgatagagcaagactcgtctcaaaaacaaaaaaacaaacaaagaaggttgaatacaaatacaaagcaaaagtttacatcatacagacttggtagatatgtttttaaaagtaaaaataaaagactgaaattggccagaatttatttctagggacccagctgtcagtgcagactccgtgtaatacctagacttggtgtgaggcatgactgagtatggttcagtttcctcctctaatcccgtaagatattagttctcaagaaaagagcccagggaattttaatttttactttggatcccgagcaggcatatttctctttggcctagcagaatttctttctagatctggatctgttctttgtaatgatttttgataaacaatattcaggatgtaaaatgcttagctatcatttgactgactccatcatcaggctttctcctacatgttcattttatcaaccctataaggtaggaactagcctctccattttacagatgagaaacctgaggtggttccaaagaattgggtaatttgcccaaggttcctgtttgcttggattggattgcagcctgactcttcccaccactctgtgtgctgcctcagatactataggatatgagttcttcctagagttcttctgactttgagagtagctacagctggtttccctgaaggcaggagttcctaaccttttggggttgtggatccctttgagaatctggtgaaagctatgaagaccttccagaaggatgcacatactatacatgccattttgcatacagtctctgggtatatcgacctgtcaatgtccattgaccacccccaccccccagttaagaattacccacttctggctgggcgtggtggctcaagcctgtaatcccagcactttgggaggccgaggctggtggatcacctgaggttaggagttcaagaccagcctggccaacatggtgaaaccccttctctactaaaaatacgaaaattagccggacatggtggcatgtgcatgtaatctcagctacttgggaggctgaggcaggagaatggcttgaacccgggaagtggaggttgcagtgagccaagatcatgctactgcacttcagcctgggcgacagagtgagactctgtctcaccaaaaaaaaaaaaaaattacccacttcttgccaaaatgcagcttcaagaaatgtaggaatgttctaggacagtgagactaaaacagaagcctctgttagccatcaaaggcactgacatcttactgtctgctgtaaatggcactccactgggcggcatgcagtatatttgactcacacatcaactttagcccttaaccccagtgggaaaaccactgtaaagatctggataccaggggccacatgtgtgctgatgcctgtggtttggtggggctacaacaggaaattcctgctttggaaagacagaaagcagatagccaaattctctctaccacattttggaaactatgtgtttgagtctgatcaagcatgatttagattcaaattcagaaaccatgtattagccttagttatgtgccaggcagtcctgcactggatccgttcatgtgaatggctctgttgagccctcaccaagacaaatacatctataaatgcctgttgggggttcaatatttaaacaaaatggcatatactcttcaggcaaacaggaactcttcagaattctctgctgtctatttgcgtagggaattgacagttctcacttaggcaaaatgacttgtgtgccaagatatagactttggtttcttgagcgtagctcagtgttccccaacttccatattcatcaaaattatgcatacggttgaacactcaaagctagacatagtgtgatgtaaaggattttttcaggctatcttctgggttgttgaggtggggcataatgcatgtgaaattgtttcttggaatgagagcctaacaaaggggaggactgtgttatattccgaccactgagctctgtattgcttgacactgcctttcaacctctgagaaataaaagttcacataccttaagtcgatggtcatgagagaccaggtcagggatggagtgtgaatgttgtgagctcattactgttactgcaaaagagccaaaagtagtgtttcagtatgaactatttttatacacacacaaatatcttttcttctttaaactagaatcaggtgctctggttttcattttataaatggaagggaaaccctaaggagagtctggttttatgttttagctttattttttaaaaatatatggtacctccttgagaatctgatgaaagcagacatcctgctgcctcttccagatgtgcctaagcctgtgtacacactcacacacacacgtgcacactcacagagacgcacgttcacattcagttaccgagaactcatggacctgtctgacctctgaagccagtctgcctgggttgaaatcaagttccaccacctactggctctgtggctttggccatattatataaagtgtacctcagtttctcaatctgtaaaatagtgctggtgatcctccctaataagatggattgcaggattagcagagataataaagtacttaggaagttttggcacatagtaaattcaatcagtgttagctatttttttattatttcattggtactttatgttatccaagtactctttatttgcaaatttgtaaatttaatcacattaaatattaatttttaaatactaaacattcaattttcatcattttttagtaaagtagaccttattaagacatttaaacaggtcctacattataaacataatttttgctgtgaatggaatagagccactgaaatgtacagtgaccctttagccagtaagctcatgcaagttttagctctaagaaaaaaaaaacactactctgagacatttaccaatatatttgaccatgtaactttttgtttcctgggtcatcttaatgaaagaatgctccaacttgagaaattctgctctgtgccaaaagttggctttttttctttccttttaaaaggacttattaattgttctttatgtttgcaatatgtttatagcttaggaattattttatggagtatcagaaaaggttatagatttacaaacaaaccttaagcttgtggagcaaaaaataaggcatttgttatgttctgtacttcttgtgattcttgactatatgagtgcaaatggcttattgagttattgttgagaaatataaaaagctaactgataacttctccgttaaaattttacaaaaacttaaacacttctttcaggctgcagaagatgtcaatgttactttcgaagatcaacaaaagataaacaaatttgcacggaatacaagtagaatcacagagctgaaggaagaaatagaagtaaaaaaggtattgaaaataattattagaagaataaaatttttttatactatagctactaaaactgaactcagttaacaagtgaatatatatttctctgggctgtttgttgcagatgaatgacgcgatccactctagttaagcagaaagtcattttttttttaagggatatgcgataacttacagagttgttgaggagcttgagtctagaccgaggttccaggaacaagtctcggagaacttggctggcggtggaacagctgttgcctccactgatcccagagtcagctgtcttcccaatgaggaagccacccttgcagacttaggaacaccaagctgctgctgccagtgccacctaccccagtaaatctggggcctgtgtccagccgtcccccttgagttgaaatccagctcaaatgcatttgattggtggaattgaagttattatcacttatgcatgctggcagaactttcattacccgcatgatttacttacaccctatcagcaagcaaggctgagaaatgtaggctggtttttttggttttgtttttgtaggaaggcagaattcacaaagtcaaaaattgttaaaatagaagaaattttgagtgaccatgtgcctgctgtccaccacagggcgcttattgtccagaggacaaagctttaggtagctctaagtgcttgcttgtgaaatgtcttctaaaaagttacaaattaaggtcttattctaatgtggtaataatacctttgtgagagggtccctcagagagttgctgtccccaaattacaattggcctttagcttctatcagagaactttgagtacattttctttgccattttgcatttatagaaacaactccaaaacctagaagatgcttgtgatgacatcatgcttgcagatgatgattgcttaatgataccttatcaaattggtgatgtcttcattagccattctcaagaagaaacgcaagaaatgttagaagaagcaaaggtatgttaaaggttaattctgaaattagaatttatatcactataaagaacatgtaattatagatgtagggaaatagtagatgctagctatagctaatatttactgccttgttatgtcccaggcatgctccgaatgctttgccagcaggattttgttgaatcataacgatgacctgttatcccaatttagggacaaagaatagaggcttagagaggttatgggatttattcaaagtgacacatagacagtggtcttctgactccagaaccttgctcaaaactaaaagtatttagaaggtatagcatatattgaagcagaaaagaaaaatcccctgtaattctgctatgcagaggtaaccattcatagtgaacattttcctgtatttcttttatgttctctctgcctctctccgtgtagtttgcttcccagttgggacaattaatgttccaggaggagcatttttgctggtttcattgaatgtttgtttgtccagcagatactcattggaagcctgctctgagcctggcacacaggcctttaaaaacatcgtttttgaagactgtttaatatcatgttgatggttatcaattggggtcacgggtcttattgttagcattaatttgtttccaatattttgctgtactaatgttactgtgagcattcttctacataaatctttgttcacatttagaaaattgttttgaggaaataattagagaaatataattactgggtcagtcagcatatgagttctctgataatatctgagacatttgatacatggtatgaaattttcagttcacatgccttcttactatttgggagggacagccacgttgtttgtctatgagaagcagatggcaattaaacctttcctaatgcttttgctaattaacctgattgcttaaaatgatagtctctcttcaaatgtcataaaaagcaaaacttcgtatgaatgaaacccacatttagtaagtcttcagaagaactatcactcctgggtctttccatgcataaatcttatatgtctcccttatgtttaaatcttttcttcttggtcaaattttgtgatttttgttctttttatttgtttaaccatttaaaaaacatttttattggaagtattcccagatagcttatggtttttgtggctattgtgaatcccctgccccatacacagatagctactgaacttttattttattttatttatttatttatttatttattttttgagatggagtcttgccctgtcgcccaggctggagtgcaatggcgcaatctcggctcactgcaacgtctgcctcctgggttcaaacaattctcctgcctcagcctcccgagtagctgggattacaggcgcccaccaccacgcccagctaatttttgtacttttggtagagacagggtttcaccatgttgggcagactggtctcgaactcctgacctcgtgctcgtgatccacccgcctcagcctcccaaagtgctgggattacaggcgtgagccaccacacccggctgaacctttctttttttactcattctagaattctagaatgaatggagtgcttactctgtatcaggttctgccatgtactagggataattggggacaacaaaacctgcctggcccctgcctgcatggagcatatagtctagatggaaagaaaaaaaagtaaacaaaactgataatgagtagaaagtgatatgaggatagaggtggctttaagaacacaggaagaggaatctacactagtctggacatcaagggtcagggaagggctcccagggaaagtgatgggataacagctgaggaataagtggctattagccagaaaggggcggcggggggcggggggttctagtcgtgagaagcaacatgtgtgaacggccataggatgacggtggtgcaaacatagacctgcaagaagatgtatttgctggagattgggagcacctgaaattgtggccacatcttggagaactccagtcagttgagttgaagaaattgtactttgtcttagcaggggtcagcaaactttctgtgaagggccagaagtaaatacgttaggttttgtgggctgcacagcctctgccataattactatgaaagcaagatgagtgaatctgcgtggctgtcttccaataaaacttgacaaaaacaagcttcaggctagattgggcctgtgggctatagtttgcccactcccgtcccagagcaaagaggagccttcagagatttttggaaaagagagagatgattggacttgcgatattaaaatgactttctagtgtcttattttacttattaaccaggttttctcggtatagaaatttagaatttatccctttctagtagccatatgtcttatttttgtttcttgttttgtaacagtgattctcaaacttagcatgcgtgagaatcacagtcaccacagggcttgttaaaaatccaggttgctgggcccgacccaaagacgatctttcaggtgggctgaggtagggccccagaatgtgtatttctaacaagttcccaggtgattttgtccctgacactggtctcggggccaccgtttgagaaccattggctagatttctaaaacggcaacactgtcagtattagatattctttggtttctaatgttagtgggtatttggtttgtgtgatttcatatttttttgtcatgtttaggaaaaaaaattgttttgatcctagccaggaaggaacttaatggcttttttttttttttttaaaacaaagagtatatgttaaaatttatttaatctattaatgagggaagcattaacattacaaaactggttttagaattgaagaggctaagtatctatagataggtaggtagaaagaattgtcctttggaattgtattttcttttttttaattataaattgacaatttataattgtataaatttatggtgtaaaacgggatgttataatttattaatacaatatggaataattaaatcaagatagttaacatgtctatcacctcaaatacttagaaaatatctgagttttcactgggcaaagctgctctttcttacaaatgaggcactttttaccactcttttccaaagtttagctccagaggcctcaaagttagtgaaaatttctgccagatttggatcataagttgttcttcttaattattggtggttggtggtgtgagtttctatcatttcctgtagtctcatagttatttttgttgttggaaaaagctgggttagaagccagcaggcccaggataaactatttatagaagtctttgtatttggttctttgttaggaaataatttagacagtaattttttactattttttagatcagcagaaactgagaaaacaaacttgatttattctgtgataagcagatatggaccatgaattaaaaatgcccacattcagacatttagatctaattatcagtgttacttagctgcctgtccaagtttagaaggttcttgacctaaaattcttcccaaatattatttcagacacagatgctcagaaatcatcctattgaatagaattaatttaaaatattttttttccagaaaaatttgcaagaagaaattgacgccttagaatccagagtggaatcaattcagcgagtgttagcagatttgaaagttcagttgtatgcaaaattcgggagcaacataaaccttgaagctgatgaaagttaaacattttataatactttttttatttgtttaataaacttgaatattgtttaaaatgataattttccttcttcaaatgacatggaaagcaaaactttcttttttaaaaattttcatttatttaatggaaacttgcccattttcacatgtctgcttatttattttatatttttaaaagaagacagtattcacctatgtattttgcataacgattatatcaagtctaggggcttcatgtcatgttattaaaatcagttaagcaatcttttatgtttctatattatttagaatatttgttgttgcaattttcacataagaaaatttaacagttgtgtcatgttgtttctgtctgattttaattgctgtctaatgacggggaaagcacgatgaaaagatgtacaatcctgcatccttgcttatttcacaactaaagctttgtcatagacttcaaaatatatatgtatatattttatttaaatatatgttacatattatatttaaacatacatatttaacattttttacatatctatcaatatcagagatttgggtaaaagaatgggtaatgtttaaacatgtggaggcatgtggagctttatacaaacagggcagaaccacagaagaacgttttagaaaccaagagatgtgcagaaagaaatgtttagtgttttttcgttttaaattttagattttattttagtgctttgtaattaattggggtttatattgataaagatgtggaagttaaacagctatgtatgtaaaagtaaggcttatttcttaaataaaggatgcatttcttcccactcccccacaaaagacaaacattttgggatttgggagacctaaatgtattaactttccagcagatggcactgatgtgccaaatgtgaatggaaggatcctaacacaacaatgagattgttaggattaaatatacataattttagaggaaatatttttaatttttaaggctaaactgcatatgtattttttggttcagtgtttataaacatgaattcaggcttaaagatagatgattatataatttctaaaattcttaatactataaaggcagttttttcttttcttttttttttttgagatggcatctcactctgttgtctaggctggagtgcagtggtgcgatctcggctcaccgcaacctccacttcctgggttcaagcgattctgccaccttagcttccagagtagctgggattacagggacttgtcaccactcccaaataattgtatttttagtagagacatggtttcaccatgttggccaggatggtctccatctcttgatcttgtgatctgcccgcctcggcttcccaaagtgctgggattacaggcgagccattgtgcccggccaaaggcaaatttttaaattgctgcaaaaatcttcccaaatagtgatattccagttctggaaaatgactcttaccaaaaaaatgcaaggatatttttttcttgcatccatttggttaatgttcagttagaggattgaggctggggaggtagtcaatcaagttgcagcaggaaataagatcagaataatttgaggaaactctcaccaaagttaacaatggtgccgggtgaccactagggtccttttggaccctcaaaggccaggggagagagcaactgcccacttcactccctgaccagggaaagttgcttttcatctggggaggaacacagccagcctgtgtcatacctgcagtggtagagccaggggactagacatcctgacctcattctccctccaaaatccacctgtgtcccaccattggccaaacccaaccagaatccggaggtggtccatagaagtcagtcgcctgcagggcctgggaggggtggggaatggataggtctggggatcccccagtggaagatctagcataggagggcgactaaagtttagccctttagaaatgttaacaacgaacactcgcctgacatgggccaagagactgaactatgtaattcactgggacttcaaattttgtcctgcatattatcaagaaaacctaatacaaaaacccaaatatctaacatcagtgggatggaagcgtgtgatgttgctaacttcattttcttaacttacctgtgacattttagaacattacaaatatttgattcccattttaagttcatttctaaagcctttgcttatttttgtgaatagtaacttccctgggctagctgaagactggggaacagcacgcggtgcatctgaagggaaaggaagaaatgtcagcttcagccagtagttgcgacagagggaagttttgatctggatttgtcactaacttcttttttttttttaagcaggaatcttgatttgcatgtgcaatcactctttttagactgggccactatttgttttttaaagcagtgcaggctacacaacagataattgcacaacagatctggccctgagactgccaggttgcaaagtcaggtgcataatatgatacgtcatgtgcaggcttttcacaggaagtggtagtagaagtcttctgagcagctatgctttgctgctgactgtaatgtttcattatctctcacatccattaatttctttccatctccacaactactgtgatccttgtccaagccttgtgagctctagtcaaaagcatggctaagtaagggagcaaggggatggaaaagccatttgaggtagggtttcgacagggggtctctaaagggttttgaatagaaaggagcagtactttttaataatttggcagttgttaggtgggctttactgtagaaagatggaggtagaaatactggatgttattgtaccttttctggtgagccgaatcagttggctgaagaaaagatacaccaggacttagagaaggggtgaaatgaacaaattttgtcaatgattggagaaacgaaggtgaagctagaaggagaaacccaaagagaagttggttttgagcacaggccagtacagcttgcaacaggttttctttggcttctatagtttaacaaagaaaaaaaaaaccctgaatttgttgccacaatcaaatccagagatctcacataaaaatgcacggtttggcaacattgaaaccatatttctaaaaggcagtcttcagctgctcatgcgttagacaaagcaggctgtctccagttcaccccagtccccacctagcccactaccctcatttatattacctgcgtggtgcctgtctgtatttgctttgtaatctctggatgcctgctggtagtgtaagcagaggcaggaaagaaagaagtgtctggtttgcaggaagcagggcagaggagggggagggtgagagaagggcacgagcttggcatcagcacttggacttcccagggcatcagccacgtggagacatgtaattggcaaccggaaaagtgtgttgaagtttaggatatgcgggactagggaggtatatttgagaacccttttcatcctacagaagggcttaacatttaacgcacataaaaatcacccggggattttgtgacactgcagactctggctccgtgtgggctcgggctgagatgctgcctttctaacaagctcccaggtgacgctgctgctgctgagccctggtgccatgcattggacagctaaggtagcttgccacgaagaagaggacgtggggaaaatgcaggtgggaggaaaaagaaacagcaaaggagacagaagctgcaacggtaatgggagatccgcaagagtgtggaatcccagaagccatgatgagaatgctgaaaggaggagggagtgtgatcaacagcaaatagtacagtggcgaagccaataagagccgagaagatggagctctatttgatgactaagaaggcccttatttccttcaaaagagttaacccacccctactccttacacacaaactggagctccaaacaccctagaccccctgacccgaggcccccacacctgagccccatacccttgaaccccacacacacctgagccccacacacacctgagccccacacacacctgagccccacacacacctgagccccccacacacctaagcctcacacaaagctgagttcccataaccctgagccccgaaacctaagtttccccacccctaagacccccacatttgagccccacacacccgagtcctacatataactgagtccccatacacctgaggcccccagactggagcccccatatactcaagccctcccacacacgaactccccacagagctgagtctccatgtacctgatctccccacacctgagctcccatatacctgaaccctacacacacctgagacccccatacctcagcccctcccacatctgagcccacacacacctgagttccacacacacctgaggaatcagctccctcccgtcaggcaccagtgattctcgggggtgataattgtgtggtttgaaaaagcctgaacacattaggtgctgaggatcaaaaatacatgaacaattctctagttcagcgtttctccaggtgtgaacatggaaccaacatcacctgggaacttgttagaaatgccaagtttttcacaggactaaaccctgaaaaaaaattcccccactgggcaatgatattgagcaacataatggtcattgccttcaaagatgacttcatagcaactctgcagacagggcccagggttttaacaagcactccaggtgattctgactcagcgaaagagctggtggggttcaaatcattccatctttctgggattggagggcgtgggggtggtgttgggggaagagactggagcaccaactgagaattcttaatgcagattatagtgctggagagggtaacaaaagagggcagcatcaaagagattgacccatccagtttagggatcgagggtagctagaagcattccggttgctggtagtaaacagattataaaagattaagcagtaggtggtgtgagacttggaggcagcaagtgaaaagtatttttacaagaaagttaacagtggtgggaaagaggcagagcatcacttaatgtcactgtggtgcagatggaaaggctttttttttttttttggactagggaacacatgaatacacacagtagatgagaaggagccaggaaagaagatgatggaaaagtcaacggacaagaggtaatagttggagcacatctgtgaaagaaaggggtgctgtagtgcttatacaaacggtagactgggaaaacacagaattaggtgtatatgttacaaaaactcctaaggaataaatggtagagaaaaaaatttagaatagtgatgaactgtaggaggaagatatagttggggtaggcaaaaacaggaggaggcttcaataatctttatgttctatttcttaagttgggtcatgggtccatagttattggtagtcaatatgtttattattaattattttatgtacatgaaattcttcacaataacaagtttttttataaagttctgttgtggcacaaacaaactaggaaaaatgtgcattactgtggcattgttattgatatttctgtattgcattcaactacttttttgtcatttgacataaaatggatcatggtgactctccagttttgttttgtttttttcttatagagacagagtcttgctctgtcacccaggctggagtgcagaggcatgatgttggctcagtgccaacctccgccgcccgggttcaagtgattctgttgcctcagcctcccgaatagctgggactacgggcccatgccaccatgtcctgctaacttttttgtatttttagtagagatggggtctcgccatgttggccaggctggtctcaaactcctgacctcaggtgatctgcccacttcggcctccgaaagtgctgggattacaggtgtgagccacggcgcccagctgactctccagttttaaaagtagaaaatcagcaacaaccaaaaagttaaaagttggcttacagatttggtatagaaaattgtttgtgcaacagtcattagcatccgtttgtatgtagaaatttctggtaactaagttctttgatcctccattctggtatctaggaataactctagtgatggcgacgttaacaattagctttgagtgcttattgtaggctgtcagtcttctgaattttttttatatattccttcctcacaagagccctttaaagtagattctttaccatccctcattgtgcagaagtagaggaaggtttagagacgttaacctgccccaagttttgcagcttacttagcaaatgggtggttaatgaatgcacaagttgtacttttgaaatttattttgttagatgattttatttgtgttctgttacttatccaaaggaatttcagatcggttctcatatagacatataaaagtatatgtgtgtatatataaaaatgtaaatatagcattaatagattaggaaaaaagaaagggagaataagttggtcacagagtccacctttcagattgatgtactctgaacctctatgtagctaagacagagaaggaaaaatgatgagtaataccacattggaaagggtgttatatatgaatatctcaggagacaaaacatctttcagaggtctaaaccttaaaaaaaattttccctcattaggcattgactttgagcaatgtatcagatgctaactttaacaaagacttcaaagcaaaggcaagagcaaaattcatatggccaattcttgtagcaattaaacagttaacctaaatccaagggaaataatttagaaagaggccgataatacgcagccaacatccacagatgtaccctgagctaggcattagatatcttatgtaccctgagctaggcattaggtaagtattcacatacattaatcattacaaggtacaaactagtattatcatcatgtccatttacagatgaggaaacagaagcccagaccaaagttccaaggcccctaagtgaggagccagaactcaaacccaaacagtggggcttccaatctgtcctcccaaccattctattgcaatattgaagaatcttcttacaatcttcccagatccaaggacagtccataggtcacttcaaactcagaatttctcttcaaataggaattagagagcagaataatgatggcctttgtctatgaattaaattaaaagaccttcttcctaggaacccattttaattcagtcctataagatagcaaaggtatcagattatacccacagaacacctggaattctgaacttgaccactgtgcacaataatattgggggccaggcttggtgagccaccatacaccatatggagtatggaggctaggggtgggtagatcacttgagtttaggagctcaagaccagcctgggcaacatggtgaagacttatctgtacaaaaaacacaaaaattagctggatgtgtggtacatgcctgtggtcccagctactaggaagactgaggcaggaggactgattgagcccaggaggtcgaagctgcagtgagccacgatcatgccattgcactcagcctgggtgacagagcaagaccctgtttcaaaaaataaaaattataaaaggaaaggaaaggaagaaagaaaagtattggggagggataggttctattgggaagggacaatgaacaccacagccataaattctgattaattttgtaataatacctctgacattcacaatcttattgtaacttggagtaacgctggaattattggtagagttcgataaaacctatagtaacacagatgagcaagtgtactagaaaactgaattaaacttttctcagggtgtgatactgatggaaaataattgacctgaagaggacttgcagttaattaataatctattaataattgttttaaatcatttgactcaaacttataaagtccaaattatagtagctgatagtggcataagaactgctacactcatgcaaaaatatgaaacttatgtccaagaatcttggtctgcttcacctctcccatccttgtcgctaccaccttgggctaagaggcagtgagtgtttatttggactattgctggtgtcttctgatgggtctcccagcctccattcttactcacacacgtccccttcaatccatttttgtagccagataatctttctcagactgcaaatctaattatgttactctttctttgataaccacctcctcccccctccccccaaaaaaattaatgttctcccccttggtgagagtagtgaaaatgaaaacacctgacacagcctgcttggtctgaaccctatctacttttccacttcccctttgctctccacaccaaccacaccagccttatgccagttccccaggtttattatgcaccctttggtcatagaacctgcatccttaccaggtcaaagccccagatatactttcatagttccacatgcttctcctttgttgcaagaacagctattacatttatattgatcattgcaaattattgacttgtcttcctcattagactgaaatcaggaaccatgataatgctttgcttattcccatcttcccagcccctgcctaccatgaaatcaagcacacgacagtgctcaatctacactggaatccaacagttctgcttgatatggtttggctttgtgtccccacccaaatctcatgttgaatcgtaattccgaacgttgggggagggatagggtagaaggtgattggatcatgggggcagatttccctcttgctgttcttgtgatagtgagttctcgtgaaatctgatggtttcaaagtgtgttgcacttccccctttgctgtctgtctctcctagtcacccatggtaagatgtgcttacttcctcttcgccttctgccatgattgtaagtttcctgaggcctccaggtcatgcttcctgttaagcctgcagaactgtgagtcaattaaacctcttttcttcataaatgactgagtctcaggtagtcctttatagcagtgtgagaatagactaatatactgctcctagatgtgtacctaatagacatgaaaacttgtgtccatcaaaatacgtattaaagaatgctcatgcaatagtcctggtttaccctagggggataatgtgcccaggccatgcttgaaaccatggatggtactctatatatataccattttttcatatatatatatatctccatacctatgataaagcttaatttacaaattaacacagtaagagattaataaaatagaacaattataaaaacatactgcaataaaatttatgtgaatctgatctctttgtctaaaataatattttattgtgctgtactacgggtaactgaaatctcacaatgtgaaactgcagataagtggggacttacttgggtagttttattctgaacagccagaacctggaaacaataatattatcaacaggagaatggacacatacattgtggtctagtcatacaatggaatacaacacagcagtgaaaaagaacatctcattatgactgcaaaaaaaaaaaaaaagcctgaatcttacagacatattgttgagtaaaaaagccagacacaaaatagtacattctgtattattccacttatatgaagtttagaaacagtggagggtagggaaaggtcaccgcttagtgaaggctaatagtaacaactatttatatggaacatttacaaaatcaccagcactgtgcagagaatttgacatgatcctaactaagtcacctccccagagcttaccctggatttttttattatccccattttttagattaagaactaaggctgtgagcagggaaataccttgcccaaggctacattgctggtaagtgcaactctgcacaatctcacggtatcctgacaattactgttagtcatttcttacagtgctgcacaagacacgtctgtcattgttttgccagaggactgtgtgagataagatgctgagcattcccccacaaggcctaagacatagtaatgactcaataaatatcatctattatgatcagtcccatgaaaataaaaatagaggctccacgaggtggctcaaggccatatagctaagtggcattgcatttgtgcagttttgattgtgagttctattgttcaaattgattctaagtgacttacatagttactctaaatgcagcaccacgctatgattttcatgggtgttgagtatttttgcctgcctgagccccttctttcataagccaaatattaaaaagcatattttatgactgccttgggacaggcaaatgtaacccaggctggattatattcaccctactttctgattttaaaagaaactaaacattttcataggcccttaaggtgccatgggccctaggcattctgcctcctgtgcctaacagggaagtaggccctgcctcaatgcagatgagattgtcacgtgctgggtgaggatggtgggtttcttctggggagtggaagaggctgtggttgaaaaagacaactgaagatgaattctttgttgatgagattatatttgtcttgttcttttttaaaaaatagccatacataaatgatttagccaaaggcatgaaatgtcatttgggttcaagtgattgtgaagcgtttttgatttaacaaaaaatcataaaatgatccagaaaaaataggagactgcaattcatagaaatgctattttgtgcgattttatctgatttggaatggggttgaggagaagtaattgatgaaatgttatgaaatgctagaatttaaataggcctgatgtaaataatgaagcatgctttcaggctttcaaaatacacaattctagtctcagtttaaaaagtggtcagttggagccaatctaaacatatatagagactgatagcagcaaccatggcatagaatacatgtttccttcaaagttttaaattacctgtttgcctagagtctgaaccctgctagaaggcctttgaaaaagcattgaagggggagaaaaatccctcaaacaacttacatagtatttgtccatgggatttgaatggctcttagctagtaactggtgtttgcaatcttttatggaggtctttaaaagcaaacaaacacataagaacaggggactgaagtagtatactgaacacattctgaatgttatggaggacacaacaggatacttacacatcttcattttgtgcacttaaccatgactgcgtgctgcacaagacaatgggtaagtgtaacatatgagttaattttggcattatggctgctattaatgcaaaaccaggacaacacaaagacaatatcacacctttccattctgtcaagaatggtgggtgcaagtgctctcaggacccagtaatagaagagcagatgaatgtaaaaccaacaggaaagccatcatcagtgcaaagaaaatgggtgcagagataattttttttttttttttgagatggagtctcactctgtcacccagctggagtgcagtggcgtgatcttggctgactgcagcctccgactccctggttcaagtgattctcctgcctcaacctcctgagtagctgggattacaggtgtgtgccatcatgcccagctaatttttgtatttttagtagagatggaatttcaccgtgttggccagaatggttttgatctcctgacctcgtgatccagcctgcctcggcctcccaaagtgctgggattataggtgtgagccaccgttcccagcccaaatgagataatcttactctgaccccaggtgtgttcagaccagaagagctacggctggatctcacccagatgtctctgatgactgtggggctcacatcagtgaatgaggcagggtgggctggtcacagctatcttgcttagagggagcagaactctctaggtgaccacagttttatacccaccctgattgtctcaacaatgaagtcgctgtggcttttatggaagagcaatttctaggttgtctttcattttatgttgatatcatggtttttagagtacttggcagtgggggagacggtgatgacaggcaaagatgtgtcgtacaagaggaggaaacagccctgtggcttcagccagctgttgccatggtggaatgtgggcaagactggccaagctttctgactgtccaagaaaagccagtaatctgaaattcttttgtgtgaaatctcccaatttctaaatgttgctgaatcattcaaagatttaaaagacattaagaagaacatgacaatgaggaaaaaatgacaaacatcagcaaaccccagttcccagactgccaattcataacccagttcacagaccaccaactcacaggggaatctgagcctttgtagaaaccagtgagggttgaacaaagccctttaataaatagtaaaaaggaaaatctcatctttcctttggaattttaaccaaacaacactatttaacaatgtgttctctatcttcaacctataggaagaaaccctttccttaacctacacaaaaagtaaataaatctacggcaaggatttttttttttttttttttttacaacatcaatgaatggtttaaatgtgatttttttagtttatgtctttcccagttgctatcatgggttaaaagagattgcagaatattgcacaaaaggaaagaaatatgaagttgcttcaaaagatgaaaaaacagtaatgggcagatttaaaaaaaaattgtcaagaaaatatccaaacaaacttaaatgtcaccagagagtttgccaataagtccataaagcaaaaagattattaacctcaagacagagctactgttgggatcacaggaaaaccatcagctgtgcaccatttttattgacacttcagggtaaactaataaaactccccatttcaattaaattttggaaactcatgttccctttttcttaaatgctgtaaaccagcttataaccacacagccccttttttctaaaatctcctcttggctgaggacgtggagccaatggcacattctagcatttttcttactatggctttcctggacacaggcggctataagacgtgatgttaatgaaagggggaattgtaactatatggttttcatttttgcaggtgagcttgttgagccattttgaaatcaagtgctcctttagggtgtgcttagtgttccttttcaggggttcctggaatcatgtccgagctgaaacagatcttggggaattttattacagattttacagactggagaattgaggcccagaatgtctaaccctgccagagccaaagagcaagaaggagtcaacttcaattccatgtctttggtaggcatccttctaaattgactcccacttacccctgcctcctggtattcatggctctgtgtagtcttcttcctttgaacgtgggctggacctagtgacatgcttctgatgaatggaacacagcagaagtgatggatgtcacttctgtgtaagtcacaaaagactgtggctgccatcatgcttgccttcgctttttctgacacacatactctctctctctctctggctcttctcacatgcttgctctaataaagccagctggagaggcccatgggacaaggaactgagggaggccatccaccattgcaatgaaggaacagaggccctcagcccagtcaccctggagggactgaattccaacaacaactatgagtgagcccagaattggagccttcagatgagaccacaaccctggctaacaccttgattgcagctttgtgagagatcctaagccagaggcccccagctaagtgatacatggatttctgacccacagaaactgtaagttactctatttccatagtttggggaaatttgatacacagcaatagatagctaccacgatgtccagggctcttgactctaaggccggcattctttgtttcattggctgcctttatattctttgtagatatctgcatcctattagtgatcactggcagaacaatgtactagttaatgtccaggatataaagataagagtggcagagtccttagtatcactgcattttgctttaggactagaactatattttatttttatttatatatatatatatatatatatatatatatttatttaagttctagggtacacatgcacaacgtgcaggtttgttacatatgtatacatgtgccatgttggtgtgctgcacccattaactcgtcatttacattaggtatatctcctaatgctatccctcccctctccccccaccccacaacaggccccggtgtgtgatgttccccttcctgtgtccaagtgttctcattgttcagttcccacctatgagtgagaacatgcggtgtttggtttcttgtccttgtgatagtttgctgagaatgatggcttccagcttcatccatgtccctacaaaggacatgaactcatcattttttatggctgcatagtattccatggtgtatatgtgccatattttctttatccagtgtatcattgatgggcatttgggttggttccaagtctttgatattgtgaacagtgttgcaataaacatacatgtgaatgtgtctttatagtataatgatttataatcctttgggtatacacccagtaatgggattcctgggtcaaatggtatttctagttctagatccctgaggaatcaccacactgtcttccacaatggttgaactagtttacagtcccaccaacagtgtaaaagtgttcctatttctccccatcctctccagcacctgttgtttcctgactttttaatgattgccattctaactggtgtgagatgatatctcattgtggtttggatttgcatttctctgatggccagtgatgatgagcattttctcaggtgtctgttggctgcataaatgccttctcttgagaagtgtctgttcatatcctttgcccacttgttgatggggttgtttgtttttttcttgtaaatttgtttgagttctttgtagattctggatattagccctttgtcagatgagtagattgcaaaaattttctccattctgtaggttgcctgttcactctgatggtagcttcttttgctgtgcagaagctctttagtttaattagatcccatttgtcaattttggcttttgttgcccttgcttttggtgttttagacatgaagtccttgcccatgcctatgtcctgaatggtattgcctaggttttcttctagggtttttatggctttaggtctaacatttaagtctttaatccatcttgaattaatttttgtataaggtgtaaggaagggatccagtttcagctttgtacatatggctagaactaaattttaaactggccatcttaatgggatacaacagggcttccaaataagactagtttccttattgggaaaatgaatatgacaatgcctgtatcattgttctattgtaagaaataagaaatgcttacacacacacaatgctctctgtgtgctgagctctacacaaagcactttattaatattaactcatttaattctcataattttatgatgaagacagtagcatcacccttcattttacagacagggaaattgaggcatatagattttttaaaagattacactggtgaaaggggcagaaaaaagattcacacctgaggcgatcgttgagttctagagtctgtgttttaacaattttactttcttgcttttagaacaatgaagaacaatggaacaacatatataatatcttagcacagtactcaatacatattaagtgctcaatatgtggctgctattattattattaaagatacacttccattgtggcattggctggcaatggcagatcctgcatataacaaagattttatgaggttttgatgaaagctgacctgaagcactcaaattctttaggatatctgtcaagtgaaaatgccagcatttaaaaatgcttggatctaaagatatcaggatactttctattgaatgtgatctaaagcaaacaaacagctagccaaaaatttctcctctgtcttgcttaggctaagaagcaaatgtattgtcacgcataactgaacattcagaggcaggattggcttcaggcaggctggattcaggctcatacaatgtcatctggatttattcctcctgccatctgctatgctagcttcatcctaagactacattcaatagtgcccagcatctccaatccacgcccttctgtcatcatggagagatgattcagtagctccatctttatatgtttccaagtttgggccacatgaaagaatgaaaaccttgtagagcttaaaaaattaaagattcattctgattggactggcttagtcacatgcccatttctgattcatatcagagagatatggtggtttgagaccaggtcatgtgctcttctctcggaggtgtaagtggagtcacatcctgacccatgaactagagcagaatgggctactatccgagaaagtgggaactgatgtcaggggctcactgcaaaatgttgaagccttaacatatctacatgtttgatgtctagttctttatagagagtaaatatatgagtcttccatcattttgattcttgcttttgtcttgtgtactcttttgatcattatttttcatagtctgctttcttatataactcaacatttacaataaggtatcctagcaagcactttttaaaaacatatataactgcaaaaaaagaatggaccacttttctgggactgtgcctattgaagaaatgtgggctttattattatctcttagttttttgtgtaaccttttaaagtgctttatagctctctctcctcctatatttatctttcatttgaaacaagtgaaaaacgggatcaattcttggcatcagaaggaaatgaatacctagcaaaactgcatcactttggaaaccagtgcaatgaataactaccctta

SEQ ID NO: 65 - DNA, 173115 bp, Homo sapiens
taagcaatattcatgtgtgcaagcaattgtgaggttaatggcacttatcccctggaatgggtctgtatgaatttggaagctgtggcaacatgttgcagacagcttatcatgaacagttgtggctggaactgataatgtcttctctcattgccaggctcttgatccttcctaattcatatgatttgcatccataattttggaactaaaaatatgtcttttaaacaagtaatatataaagagaaatgttccaaatcctatttatattttaatttattattttttatttccataggtttttggggaacaggtggtatttggttacatgagtaagttctttaatggtgattttggtgtacccatcacccaagccctacttttaattctaaggtgatagagatccaggattaaaaagaaggataaacaaaaagaaaatagaagtaaaaaaaaatagaaatcaaagcatcaactaatgatatggaaaaagaaaagccaaacctttgttctttgaaaaaactaaaaacaggcttttgttgagatacagacagcaaaaaaaaaatcctaagaataaagcaaaaacttctacaattatagatgttttaaaaaatcgtaagtgaatacagttagcaactatgtgccaataggtttataagtctaagtgagattgagaattttctagaaaaaaatgtaaattacttacactgacacagaaagtagaagaaaatctaaataaaccagtaaccatgaaggaactgaagtggtggcaaacatctgcaggcctgtgccagcgctggctccatcggtggggacctgagctgggtagtcacatggcggccccatgcttagaagtaccttgctcagggtttaattctttgctggctttgggtttaattctttgctgctactatcttaaaattctttttctctttctttcttttttttttttttagacaaggtctcactcttcccacaggctagagtccggtgacatgatcacagctcactgtagcctcaaactcctgggctcaagtgtcacagctcactgtagcctcaaactcctgggctcaagtgatcctcctacctcagtctccctagtagttgcgaccacaggtgtgcaccaccacacttggctaattttttttttgaagtttttgtagagatgaagtcttgccatgttgcccagggtggtctggaattcctgggctaaggtgatcctccagcctcagcctcccaaagtgctgagattacaagtgtgagccaccacacctggccttaaaattattagtttgttatattaccatatataaattataatatatgttacattatcaactgttaattatattatgaaaatatagtaacatattattaactaatatattaatatatattatagaattaattatagtatatattaataagaagccctccttttaattttgtgcttggccctgcaaattatgtagccagacctgtacatactggtatacttttataggtgagtttttcaactaattttacagtactgataatctaaaaacttttgaaaataggaaaagaaggcaaattacccagttcagtttagaagatcattgtaacaattccaagatctcttgatgaaagtcattcagaaatttggagataaaatgttatttcattggacctgccaaaatatgaataactgccataatcatttattacctaagaagtttgatattgacccttacagttgagaattgttgtgtcttcaaacgaagttgttttctaattttttgttttttctgtttccagcaaaaagtatgctagaatagcttatcctaaattcattctaggttagttgataagttaactattttaagctcttccggcatttctacactcttaaagtcttaatatgaatttttttccaggtcactcgctagtgaaccttggaaagatttggcaaattgacttaatgtttgtccaaagtcagactcagcttatttttccggaagctctaagttaaaaaaaaaaaaaagatggaattagtgttggaaatcttattaagaatacagtggaagcatacttgttttgttcttttgttctgtttctatatttctgatccagctacgttgtttctctataaggcgggcagatcatttgaggtcaggagttggagaccagcctgggtaacatagcgaaaccccatctctattaaaaatacaaaaattagctgggtgtggtggcaagcacctgtaatcccagctacttgggaggctgaggcaggagaatctcttgtacccgggaggcggaggttgcagtgagccaagatcgtgccactgcactccagcctggctaatagagccagactctgtctcaaaaaaaaaaaaaaaaaaaaaagggggctgccctctgtttcttgccacgagggcctccccaacacaattgcctgcttcatcaaaacagatgactattacaatcctttctcacgtaatcaccaagtgacatctcatcaccttcgacatattctattggttagaatcaagccacaggctccgccacacttaaagggaggaatttacacaaagctttgtttgcctcataaaatatcattcacgtattattttacttagggatcatcttttaaaacttgaacaaattgatttacaagtaaattttgtagtagcaccagaactttagaaataactggtattagcagaagataattgcaaacatacatattaccagcaataaaaattacttgtctgtgtaccttgaaaattcatcctgtgtataacttgtgattatacataagcatccttaataaaatgctgaaaaaaatcaatgtaatacacttaatataatgccaatcacacagtcagcccttaatcaatgtaagttattcttattacagatctattaggttggtgcaaaagcgattgtggtttttgccattacttttgcaccatcctactacaagtttggtctccagaatatattgtatatcggatgaaacacaggctgaacatcccttttccggcacccttggcctattgatcatgatcttctttcctggcatgcttggactcaacttcagaatgtttcttgatactgtgtttcaggcaactgccaccaatcaattggtgttggcacaatccagaggaccgctaccggtctccagtagatttcacctggtgtagagagatctgggccaatcataacagaaaaaaagcattaacaatacataaaatgaagggggaaaattgatctattaaaaagaaaacaaatgcagatgaaaaagcaaagcatttctttttcaagtatgtcatcaactctcaacttcatatttattttgtcttcctgatctcttttctcccacaatatgggacatcctcatcactttacctttctgctcaatgtgtgcaaaatatattgcacacccagttttatgaaagcacaacagattcgggaggagaaagtttcctctgtgcaaatcttctaatcaattctaaagcattggtacttgggagttgatgctacttgagaagctcaggtgcaaggcatcctgatgactaagggttctgcaaatattttattgctgataaaggaggttctagaggacaaaacaatcatggagaagcataagtgatattaatcacttattaggtcaacttccaacccaggagattaggaaaagctcaacaaattaggccaaatcataaaatggcaccttggctttcaaccaacagctttctcctgaatacttgctgatagattcattgactgacccatttaggttctttgagcaccaagaagtgcagggaaatgagcaagaactatgaagtcagacagactggggtttcagtccgagcctgcttgctgcatttccctgagcaagatacttaacttctctaagcctaattgaaaaatgagaagattcccagagatttggcaaggccatgggagaaattgttgggacaggttatagaaaaggactaaaatactcaaaatagattagtggccctaatcagatatttgtgcatttcagctttttagagaaatgcaatgagatgccctaaaaaccaaaggaaaaaaattcatagatttctagaacgtgcaaaatagacgttgaaaatgaggcgtgccaggtgctatcaagagtagaggctgagtcaggactcaatgttggggaccgaagctcaggccctgccccagaaaggattagctccagctgatggctttgtgggctcaggggccacacagaccaggacctctgttttttcacagaagccagaaatatgagatggtgcatctcatcccacaactgttaaatgttagtaaatctttaaatacctgctatttactgagaattcatcatgtaccagacagcttctaagagttttagtgcattgtttccattgattctctcaacaactgtatgaaatatgttttgatcattatttctgtttcataaatgagaaaactcaagcacagagaggtcagaatcacttccccaatgccacacagcagaggagctgggatttaaacccaatctatctgcttccagcactcagttcttttttttttcttgagacagagttttactcttgttgccaggctggagtgcaatggagggatcttggctcactgcaacctctgactcctgggttcaagcaattctcctgcctcagcctcccgagtagctgggattacaggcacacaccaccatgtccagctaatttttttgtatttttagtagagacagggtttcaccatgttggccaggctggtcccgaactctcgacctcaggtgatccacctgctttggcctcccaaattgctgggatttcaggcatgagccactgtgcccggcctgcacccagttcttaaccacctcgatacactgcctatttttcttttcttttctttttttttttgagatggaggcctatttttcttttaaattattttgacataatttcagaaaagttacatgaacagtacaaagaattcccatataccattcacccagattcttcaagcatttgcattttactactttggttttgtccttctttttctctctttctacatacacagacacacagacacacacacacacacacacacacacacacacacacacacacgtcttaactctgaatgctgagcttgcctagaagcagtaacatcccagtagcaacaagcaccaggagccaaaatctcgatttctaaatgttcttttctactgaaacaaattaggacttcttgaagaaacagatgattccacggtggggcaggtaaagtacaagatcagcctggaatattttattgttccagaaagcaggaagtgctcaaaaatggtaacaacatgtcaaaacaaacaaacaaacaaaaaaccagcaacaatgcacaggaacctatttaaagaggctcccattaatcaaatctggggcaatctgaatatcaaaatgaataatgacagtgtaaaaattataacccattcaaaaacataagaatctgcaagctcgcactgacataaatagacataaattataaataattaattcttcctgacagcacgactgtaatctcagcactttgggaggccgatgtgggcagatcacaaggtcgagagatcgagaccatcctggccaacatggtgaaactccctacatagctcaccacaatagcaagtttatatgcatttctgtgattatttgattgacatttcctccccttgttcttccccatcctccgtagtaggatacagatggcgtaagagcagggacatgtttattttggtttgcccctgtacccatgatgcttggcttacagatcttcataggcactcattaaatatttccttttacctggttgtcctagttgtaatgtttacaaccaccatttatggtaaccaataaagctaggcaaatttcccaggactcgtgccaagttgtaaatcctcctctccaaggtcttctagattaccaggtcatacagtgcctgtcacagggtagatgcttagtgactcagggcaattgtgattgtcatcagtaacacacgctgctcagtgctcgtagcttattatgacacctttctggtccctattctgtctccctcaaggctgactccatattttagctttaacaaaatttccagggatatttgtgggaaaccagtacacaataatatatatggaattcagtccagttggcttttgtgatgtccaaataatttttttgagagagaggaagggaaaaataaaaagagagaaaggaaaaaaaaatgaaggaggaaatggagagatcaaaggaattcctcaacgtttgtagcagggattctacagaccaggtactgctcccccggagagtaggaattatttatggggaaattacttacacaggggatggagtgaggttgcattatatgcacacttaacccaggcacatccaaccatccatgcttggagtggaaagatgactatggaaggatgtagcccaggtgattccaacaccctcactcaatgagaacagcaagatgagaaacgagatccacctcttgccttatttctcatgcacatctcaaaatgtgagctcctgatgcccttggtgtggttctagcatctgaggaagtgcatttttcatgtgacatggcccctagacataagccaactactttaggttgttttcacccactagagcagaaagcttttccaacaccggaaggaatcctctgtggattaaaacccatttatgcctagtgttccattagtggaacgctaagcttctgggagttattgaaatcccactgcttaaggtcatcgctaaggtctgatttttcacaaaaaaatttgcaacctctggcataaatgggttaatgagggatgaaactatgtgtttacggtatactttacagataattgaagggatgtaaagtttaccgtaactctaagaaatttttactctggttgactttcaaacctaaatccccagtgcgctttctcgctaatgaaacacctgtgagttccataccccttaaacttcatgctgatatagcaggaaaaatcctagattttattttattttttgatattgaatttcacttttttgcccaggctgaagtgaagtggcatgatctcggctctctgtaacctccgccccccaggttcaagcaattctcctgcctcagcctcccaagtagctgggattataagcacctgccaccatgcccagctaatttttagtacagatggggttttgccatgttggccaggctggtctcgaacccctgacctcaggtgatccatcggcctcggcctcccaaagtgctggaattacaggcatgagccaccgtgcccagccaaaaaacccctagattttaaagttgttaacttcaccaggttttaattctagaggagtcatttcccaactgtgtgacatggggagtttacttaacctctctgagccttagctattcaatggacgttaacatatgcgatgcacaagtgttctcatgaagatcagaaaatttgaaatgtacgtagctcggtgctgagcatagagcagggatggtgtccaaattcttatttcctcaatcagagaggcaaaagtcaaacaactccctttacaggggcagaacctgtcaaaagaaatgtgctgggcccaaatgggaaaaatgagacaattacaccatctgaaaatacaaacacgatcagttttacctacttgtggagcagaacctaagagacttatgggaaattaatttttttttaagtgaaagcaagtttattaggaaagtaaaggaataaagaatagctactccacaggaagaacagtagcatgggctgcttgattgagtagacttgtagttatttcttgatgatatgctaaacaaggggtgggctattcatgagttttccaggaaacaggtgggcaattcccggaactgagggttcctcccccttttagaccatataggggaacttcctgatgttgccatggcatttgtaaactgtcctggcgctggtgggagtgccttttagcatgttaatacaggaaattaatttacttttctgtttagagtcttcttgggactgatggagaatcaccaggacaattacaaaatacagtggactccatcaacccaatggtctaatcatgggaggttttaccctaaatactggaaactacaaatccacagattaaatttgatacatttggtttggttcaaatctagttgccaaatagtgatttttctaatcccatcaattttgtatacttttatttaattaatttattttttgagacagagtcctgctctgtcgccaggctggagtgcagtggcatgatctcggctcactgcaacctccgcctcctgggttcaagcaattctcctgcctcaggagaatctgcctttctcctcccaagtagctgggactacaggcgcgtgccaccacgcccagctaattttttgtatttttagtagagatgagcagtacatgacgtgcatcccacaggtccgggaaccaatctatctttgttggaatcctggcttccctacatactaactgtgattctaaggagattactgagcacctctgtgcctcagtttccccaggtgtgaaatgggaagaatgatcacatctacttacagggcagtgacaaggatttgtgaattcatatgtagcaagtgcacagaggagagactggggcagcaagatcagtcaataaatattattatcatcatgaccacattggccatgtcagtgtcggctccaggcaacctgctcagggaggtgaggggcagcagacgtggcccttgctccaccctgtgctcctcacacccatttgccggtctttgtgcccttcgcccaggtttttcatgctttgctcctcatggctggcacctgcagccttcttcaaagactaccttctggctactatagccattttgcctggacatgtaaagtctagaagtatcttagagtttataccccaaggtgcagcctgaactgaaggagtgtggaagccctgctccctgggcacaaggagaacaaactgagctgcaatgtacactccagagctcccagagatcaggctgaggctggaacttcactcaaaaccacacgcttgtttggcttctttcccttcctcatcctgctgtccccacagtcgcacaggtctccttgggaatcacaaccctaatgaatcccggtgctggggacagcccctgtgggatctaagtcatcaaggaagatttccttcaggaaatgaaagctgggtggacgtagatggtgcgtaggagaagaacaggcagagaaagagcatgccgggagggagacggtgggaagaaccctcttgctagcatttaaggaacagcagaaactggcagaagccactgtggcctggttccagaggcctctgggggtggatgatgtgggctgaggcctgggggatcagtgggacctcagttgatagggcctggaagtgtggattgcagaatcggatctttacgtaagagcaatgggaagccccagaggcaggatgaggcatgatcaggtttgggtttgaaaagaccagtaaggcaagtgtgcaaagaacagaggggaaggaagcaagagaggactgagatcagctgggagctcctgcagagactagagatattagtggtccaggcaagagattgtcagtattgctcccagccacggaaaatttggctgttgtaggtctttcattgtgaaatgtaaacttattcttgggaattaagtattcaaacagtgaatgtggtaggcaggggctgaaatggttcgtaacctctacctgactgccaagtgccagcctccctttcatgtcatgaaagatacaagagagaacaggctcccaggccgttctacccccctttcaatcacacaaccagtgtgtgactgattgtgtgattggaaagggggtagagatagaagtaactggacttgggaaatatttaagcagcaacaaaatggaaagttattttgcaattacaagaataaactttcagtaaaactgctattaaagtctagatttatctaagggtaaattttgtgatatagggcttgtaggccatatgagaaaattttctaccagtaaaataaagtttgaatttgtttttattttgttgtaacaaaggcaataaagaggggaagtctctcaaatatttaaaaacttttatttttactttcagagaatttgaaggtatacagatgaaatctgacaagacgtgaatttataattctaaaaataatttcacagcagagagaaagcatatacctagatatgtacatatttattacaatataaagacataaatgtatatttctgaaatattctaaaaatataatgtaggaagaaatatttatcaaatacacagaattatatacagtatgcatttaggaaaagcagtagtaaaaatatgcacaaataaaccatctgtaaacacaatttttaagtcttataagtattgcatgcatttctgtgcattttacatttatgaaatcatatttttcctaggagttcaaatcacaaaacaaatgttatataacagatctctaacttttgcatgctttacacttgtcccatttaatagacagaaaaattatggcatgggaaatcattttataatattaaagtcacactgaatgtttttaagctgtgactaaactttgaaacattgccctgcaccacagatcctaaatcaagtactgcaaatattaaaaaaatgactgaggcaaattaccattagaacccacacacacatacacggacacacacacacagacacacacacacatgcatgtctgtgcttcatatgcacatacacaatttaaaaattattgcttcatctttaccctaatgccataaaggaatcacatttaaaaaataaacaattttaaggtcctctaacaaaataatgccccagtgaatcactagtcttataagttgtttgacttcgttaaagtccttttaaaaatagaggtgttctctagtttcccaataatgtttttatttcaatgcaggaagaacgcaatttcatgggaggcctgataactttaaccatcatttagcttggcttacattattaagcagggacattttcctaagtagtacattaagcagagctacagtaaatggattgtcagtattactcccagccccagaaaatttagctgttgtaggtcattcattgtgaaatgtaaacttattcttgggaattaaagattcaaacagtgaatgtggtaggcagggcctgaaacggtttgtaacctctacctgactgacaagtgccagcctccctttcatgtcatggaagatgcaagacagaacaggctcccaggccattctaagcacctgaagatggtgctgacacaggtgaagtgtaaaccagcagtgaaccctgtagaatgccttggatcccagcactcagtccgcttccctgagttggatatgatgttagcaaataccaccatctagaaagacagtacagcttctggaacaattttgcagaagaaaaagtatcaacacctgggcctaaatattctttataagctgttgtatggtgtggtgtttgaagtttgctttccggtaacgtagaagccataagcaccattcttgcagaaaagttgaaatggctgttttggtcttggtaaaaaaaaaaaaaaaaaaaaaaaaaaaaaaaaaaaaaaaaaaaaggtataccctaattgtatatcaaagaagtgtatttaaacaagacaaattattagccaaagaaaaaatgctaaaacttaaaaggtgtggcttactgtgataaacatgcatgctctttgctgaaggctggggtgtcacaatgcagctagaatactttccttaccctacttgattcagttctgttggttgggatgctcagaatttgacaaatttcataatagcatcagacacttggtggaggaataataatgtattcatttgggccttgttcagaaatttcatctgtaattgcatgtttctctaaataatctaccaataagcaaatgctccttaacttgccattggcaaacagcatttttttctaggaaaatcctagaaggtgctgctaaaagaacacaatgatagaatccgggtttaaacaccgacatgtcagcctataaagccatatgttacaaatgtcttatttccaccaccaggggtggtggctcacacttgcaatcccagcactttgggaggccgaggcgggtggatcacgaggtcaggagttcaagaccagtctggccaacataatgaaaccccatctctactaaaaatacaaaaaattagctgggtgtggtggtgtgcacctgcctgtaatcccagctactcgggaggctgaggcagaagaatcgcatgaacccaggaggcggaggttgcagtgagctgagattgcaccattgcactccagcccaggtgacagtgtgagacactgtctcaaaaaaaaaaaaaaaaaaaaaaattagggccttcttaggctaacttttgatcacttcaatagttttgaattcattgtaatgtctattaggagaacataactagacttactaactcttaatttcattaaggaaattattactcaggacgaggccaacatatgctatttggcttatgttatttaaaggaaataactcagtagtattgaaataaatagcacctggttggtatatggacatggcaaaagttgtggagggaacatgagaactcctctattgtcagaaaaagtattgaatggcatactgcagaaaaaatattctattgtgttcaatacaggctgataaatatatacatttatattacatgtggttgcataacacaaacctagaccctagggctaaatacagtccaccgcttgttttttataaaatttatcagaacacagcctttgtaggcagaataacagatctcctaaaatgtgaatgccctaatccctggaacacgtgaatatactaccttatatgaaaaaaagggctttccagatgaaattaaatttatgaacttggagatgggagacatgatcctggataatatcttgtcagacagaagcaatgtaagaagaaagagagattcaaagtgtgagagggactcaaccaaccattgttactggctttcagttggggaaggtttcatgagccaaggaatatgggaaatctctcaaagttgaggatcgccttcagctgacagcagcaaaaaaataaagacttcagtcctgtaaccatgaagaactaaattctgccaacaaccaaactagcaagagaatagatcctcctctagaacctccagaaagagccccgacaacacgataattttagcctggaagagcctcatcagacttctgacctatagaactgtaagataatagatgtgtgtcgtgtaactcactaagttttagtaatttgcggtggcagcaatagaaagctaggacatcagctcactcattagtttacaaattgcctgtggctgctttcatgttccaaggtagtattaagaggatgtgacaaagactgtatggtccataaaacctaaaatatttgccaactggccctttacggaaaaagtttgccaacccttactattcacatgcaaaaaccatgaacagctgctagcatttactgaacacttaattgatgccaggctcaggaataactacttggtattcatattaaatttttgtgatacactctctttgggtcatcattttacaaatgaaaaaaaaaaaggaagtagagagtttagggaactgctcaaggtcacccagcaagttagaggtgagctgggattcaaaccccagtctggctgacttcccagcatagctcatccctcgtcattctcactaccttgcagaggataatgaaccgcctagatgctcacctgaggcgtattatcgctggcaaaacgcgatggggagttcccggctgggcaccagggtgcctgagtgtagcatctcaacaggctcattgtctgtggcctggatgtcgtatttgcggacaatctgtaatgcacacgcacacaaaaacagaattacccctctcttcttctgccttgtgaaacagcacagaacataattgcagaaaccggtaaaggttttacccaacaaagagccaaatgcagttgaagctctgctaatcggcgaccaatgcacattctttttccaacgccaaatggaagatgcgcaaaaggattaattttttccttctcctgaagccaacgttcaggtctaaactgacttgaatcttcaaaattgtcttcactggatcccaacacctgggtatttagcatgagcactgtctaaacacatgcagagacacatagtatttaaaataaccagaagagacctttgaatggcaaaattgacacaagttgtcaccttacaaatcaaaagccaaatccacaaatttataataatgatggttgccaacatgcgctgagtgcttaaaatgtgccaggtaataaataggtaaagggctttagaattgtgcaccatactcacaaccaccctgcgcagcagattctgttattaaaccccttttacagacgaagttgaggctcacagagattatgtaactcactcaagacaacacagataaaagatgaaactgaatgcaggtctctgtctccatagccgtgaattctaattctatactatgcaacatgtcaactattctctaccatctctgcattcccaaaatgaatattttccagtacaaagtctagggagatctggtgaatatttgcaaagtgtatcttccaaggttttgtaaggtatagaatatacaaattctacttactcctttgggtaaagcatattcacccagaactgttgccttgtcaagagtccgagttgtaaatggtacactcggcgtaagcctgaaaagataaaatcaaagatgtaaaggtgagcacagtctaagttctctctgaagtgtcaatgggaatgcagattggattaaataaatgctgcccaagtgcatactcaaagaggcagcatgatcacagatcttcctaaagaagttgtttttttcttctcaataattgtatctcttgttcctctcatcttcttgagttagttaaaaccccagtgcaaggctgtttagtaaactgttaacgttggttttcccccttcattccagactaaaatgtgtatgtttccgtgctagcccttgaagcgtgatgtttgttctatgtttctccaatctactcttcacaaagttgacagtatccttctaatcctaaaatgttgtgagttttgttttcccaaaaggatgtaaaaagaatttccaaaaaatgttttataccagaggctcaaaagcaaagctttctctgtgtcctattatataataatatagctcttttgtgagcctccatctcataaccttcaatcatgcccctatcttaattagtgcttacagcgttcattagagtagcaagattattgaattaaaggggagggcactggctttccaagatttaatagaatttgcccaaatgatttaggaaatgagtgccagaaaagaaatatggctccaaagatttttttgcagtgtgataattgtttctaattagctaggggaagccgcccatgagtaggggaccacttgttttgtgtttacgagaacagtgttctaacacatttatattggctcagagataggctcttacctcatagattctttcagacaggcttttaaatacggcatattcctcaaatcttctgcccgtggcacctgattctcaggtaatacactttgaatttccttaagaagcttttgttgcacttggggattacgggataaattgtagagaatccacattagactgtttgctgtctgcaagccaaatggacataaacttgagtttttgtaaataactgcattaaaccactattagctgaaaaaaaggtgatgcccaccaccttattctgcaaatgtatcagtgaagctctttcacgcgtccttatagctacgcctttagacaaatccaatatataaaaaagcagacttatttcataaaacatatcaattaaggatatattttaaattatttactgagggaatcaaagtataatcctttaatcagctgctttagaacatttaaatacagtttttttttttttttgagatggagtctcactctgtcacccagactggagtgcagtggcactatctcggctcactgcaacctccacctcctgggttcaagcgattctcctgcctcagcctcctgagtagctgggactacaggcatccaccaccatgcctggctaatttttgtatttttagtagagatggggtttcaccatgttggctaggctggtcttagactcttgacctcaggtgatctgcctgcctccaaaagtgctgggattacaggcatgagccaactgtgcctgacctaaaatacagtttgacgcaataattgttcgaacacaaatgagtacatgtaaaattggtgaaatgagaatattagtgggttaaatcaatgccaattttcagattgtgacaacgttttctcgttagacaggacattactattagtggaaaactgggtaacggatgcaagggatccctttctattttttcttagaactgaatgtgaatctacaatgatctcaaaataaacatttaattaaaagttgcttgatataaaaaacattcatataaaaatggagtaaacagagagggatggtgatcctcagggtgttgctaatgagaggctttaagagaatgttatagtggaaatggacaataaatggcatttctgaaatttaaaagttcctttggccacaccctaaaaagtcaccacaaaaataaacaggcactacctacactgagggttacaaccacatgtaaacagccctcatacgagggtgccaacaccaaaaataagaaattcaaacattgagctgagtactccagctacagtttctgacaaaggcccacacccttttaagtggcatcttttatttcctctgcacaggcaatgactagagaaaaaatattggtggaaacagccaatgtagctttaagctacataatattcaccactagtagtcatatgtatttattttttaggccgtactttgctaatttaagccaaatatttcctgaaaatgatcattgtgtccacctccgcagacatgaagacgctgttgctaagtgccatgtgccactcacacaaatgagcaccaagtgcaagaccattcagagatgatggttattttattatttttggaagaagatgcctccaaggcagtcttcttcatgtcagaggactggcagcctcggctgcaaataaactgtagatgccattattataagagtctaatttacaaaacaggaagagggtgtagccatcaaattagatacactttcaaatggttctgattttccaaatgtgactttcagaatagccaggaccaaaaaagaaacagatttaaccatatcagtgagtccctcaccgcaagtaccaaatagagtttccaaagggcagatgactgtagcttttaccaaagccacgtaaggcagtctgagcctgtagggaaaactgcaggggctaagctgcagcagctgatttgaggggaagtggcctggaaaacctcaggggcacaaactatccttgattgacctccatggaacagaccaagctcattgactggcctgctgtacccactctcttggctaagtctattctccatccaccagccagagcccacttttaaaaacataaatgatcaggtgattcccttgcttaaaatgctgcaagagcttcccatcacaggtgcaatcaaatctaatgccttacccaggctgggctcacaaggctctggctaacatggcccatccaattctccagtctcagctctgaccacatttactagttctgtagctccatccctctttctgccccagggcctttgcatgggccgtttcctctacctgcagcgctcttccacgaggtctttctgtggctggctcttctcattattccagagtcagctccagtactgctttctcagagagggcttccctttaatcatctccatctctctatattacaccatcctgatggcgtcctccacaatccacaccactatctaaagtgaccacatttgtttgtttacatggctactgtctgtcttccccacttgcatacaagttccatgagagtgggaacccttgtctctggttcatggtggtctctcaagaacctggaacagtcccaggcatacagtaggcactcaatagttcctgaattccttcatttattcaacaagtatctatcagccgctactagatgccaagtactgttctatgtcctggaaacacagcagtggacaactctaagccattgccctcagagaggtcacgttccagttgaaaaaataaaagaataatgggtgacactgtactttgatcactggaaggagccacccagggtaagcagttcaacaggaaagtgagcgaggatggattcccactttcaaccgccttgtggagcaggaggagaaatgagaacctcgctatctcctgatagagaaaaccctacctttacttcaggcaagaaacagcacagaaggggaagcacatggaaaataaacaactgctttacattttgcttagagactttaaggtgcatgaaatgttggacttaggaggaggttagcgtgcgccactcccatcacagctcgaactagtatccaagtcaattaaacctacctgaatgcctatggcaggatttgtttggggttggtctcacttagtatctgctatctcctagggagtatcggccacatcagagacagaattttggtctttacaatgagctgttttgcttcagttaaaatccacttgtcccagactctttgggactttgtttacaattctaagcagataaaaatattattggcttgaaagagagtatgccttttttttttttttttttttttttttttttttttacagtaagtaacagccacagttaggcactttggggtaacatgtgcaactgaacaaaatacttccaattttgaaaaatctggattctgtatcttgccagggcagagaactttactgctcctgaactcccgtagcagtttgcatggacatcatggcactcatcacatcctactctggctttttgtcactggggcacatgaagtctcctcctacccagagtttaagcacagaagcccgtgcatggaggcaccgtggcgtctggtatgaggccgtgcgctgaggcaccgtggcatagatgctgtgcgcggaggcaccgtggcatctagtatgagacttttcatttttgtggagttgatgctagtgaatcccagtgaaatgaatgagatgaattactatttaaaatctgtcatctaaaaatggtacagaccgttcatttagcaaactcaaatccagcccacccttaccgtttccaccgcagccagctggagctctgtgacagcagcatacaattctttctttgaaagccgattctggtgataaatgtcacaaaggaaatctgcactaggctgctgagaatacttctctaaccggttgtcgatacaagctttgactattagagcagagaagaaagagaggaagtcagctgaaaattgggatgaggaaaatcacagaagaaaacctcagtccaaactccttcttgcaatatctaaatagtcttttcaggaacactgacaatttgctacacacactaattatattattgccttcttgtcaagtcggcaaggatttttcaataccgacatgagcaaggcttctcaaactttaatgtggataggagtcacctaggcatcttctcaaaatgcagaatctgaatcagggcttgggtaggcctggaactctgcattcctaataagcttctaggtgatgctgatgccactgggctgcaggtcatagttttgagtagtaagagtttagatcttgggagaaaaaagtgtaaaagaaggtaggatttgggttcactttcagaatccaacttggacccagatattactaagcacacataccccacatacatacgcacaagtagagtgtccatccatgttgacaataatggtaaaaatttctaatatttataacataaaatctaggcgtgtacctccctcactattaagcaaacaaccaccaggctcattatatggtaataatcatgctgatcacatatggcacagcagttagagttcgagtcctggaagctccttgtctggcttcaaaccttggctttgccatcacctagcatgcaatcttgggaacgttggctaacttctatgtgtctcaggtacccctctcagggctaataaaaggacctaccttataggtgtgttgtgaggattaactaaatgtgtaagtgaacaatgcctagcatcaaatattccccttcgtcatgtggcagaaatagatctagtccacggagatactgtgatatgccaggtttttatgttaactgtaatctgtagtagacccagaaacagttacattgaggtaggttctcttattattattattaattattagtccattttagagacaaggcaactgaggatgaaaaggtgattgcacatttggccaagccaccacaaccagtgacagagctgaacttgaactcaggagtccctgactctataaattttacttttttattttgagatggagtctcactctgcctcccaagatggagtgcagtggctcagtcttggctcactgcaacctccgcctcccaggttcaagcaattctcctgcctcagcctcctgagtagctgggattacaggtgcccaccaccacgcccagctaatttttgtatttgtagtagagactgggtttcaccgtgttgaccgggctgatctcaaactcctggcctcaagtgatctgctcgcctgggccacccaaagtgctgggattacaggggtgagccactgcacctggccagattttacttttaaccactcttaattcccaaagaagactacagaaagcttgttacttagaatttgtgtatgctggggcaatccccaaaacacctgtgtttgcaaaacctaaatgtggtgatgaggctcaggagatcactccagacctcctctctgaagctccagacacgggggtgctgggctggttctggctggttgtgaagggcggccctttacctgatttgaaaatggtgtcccaggccagagtgtggtcctgccagaccttggtgttgaggctcttgtgcagctcgactggagtgaccatcatcctcccaaacgtgctcatcatctgagagaaatgcaaatgcctttttattctgaattctccttctctcaaagacaatgttcgttctggaagaggaacattctaaaccgcagcaccctgcactttttaaaaggctggaattacaaggacacccccggctctctctgcaccggtcctgggagcaatgcccgtaccccacctccacctcctttcaatattgaaggtaatgtgggggatgattttccactggatgtgtttgataaaaattgtaatcttatgacctaattgtaaaaaaaaaaaaaaaaagaggaaaaacgataactttcatattcacttcaatttctaataatttccaaacttcagtgatttccaaaccaatttcacagcgtttatcctatctacacgccacccaaactattcaaaaagataaaatctgaaaaattttgggctctttttaaaaagtatttttaatcaactgatctttaattaaaatagctattttaaccttgcctaaacaaagaaataatggatttaatgtgcttctttatgttacgtgcatatatccaggggtccccaacccccaggccgtgaaccagtactggtcagtggcctgttaggaacggggccgcgcagcaggaggtgatcagcgggccagcaggtgttaccacctgagctctgcctcctctcagatcaatggctgcattagattcttacaggagtgtgaaccctattgtgaattgcctatgcgaggaatctatgttccacactccttatgagaatctaatgcctgatgatctgtcactgtctcccatcacccccagatgggactttcgtgttgcacgaaaacaagctcagggctcccactgattctacattatggtgagtatataataataacagaaataaagtgcacagtaaacgtaatgcacttaaatgatcctccctcccctgccccaccaccctgccctgtccatggaaaaattgtcttccacgaaactggtccctggtgccaaaaaggttggagacagccgcatatatgcacataaatatactaaaatatataatgcacattaaaatgaacacttaactattgaaataaaatatgtgtgtatgccattttttgggaatcactgtgaagttctgtaaaaatcgatctgtaaaacatcaatcaagaaaactgctttcttaaagaggctgcttactgttttgatggccatgatgaagttcacagcttcatcccctgcattcttctggagaagcccaaatctcttctcatacaacacgaggcagatacctgtcatttaaaataatcatcactttacacaaacagcaatgctggagttggagtctatgtttagctggttattaaagactcaattctatgcctcttaaaagtgtgggattttctgagaaaaggcaacagtccaagaatattgaggaaaagcagagtctgagagaaaggggacaccatcactttctttttctagaaattatctccaggtccaatgactcatcacctcagagtgtcatgatcagagatccactgtcctgatcaagtcacacaggagatccaggggccctagcaaaggtgctgcagggtcgggtctgcactctgcctctaacccagctgtgtttttagagtcacttattggattctatctcctgacataatgaattggaagccattcaccagaggaagagaagggaagggaataattatgttctaaacacccattacacgccaggtactgggctagcacttcatatagggttttttttccttccatttcatcattttatttagaaggaacctttttacaaataaaattctcaactcttcatttcaaaactttttacctagagaaaagttgaaggaatggtaaaatgaatacctgaatcccccgaactcatcaacatcttgctgccatttctttctctttgtgtgtatgtatgcatacaagtgtatacgtggttgtgtgtgctgaagcatctgaaaataattttgagctctcaggtcacttcaccgttaaatactttagcagtaatgtcctaagaataaagcattctccaacataaccacaatgtcattaacatccctaagaaccttagcgaccattccataaaaaatctactgtgtcccattttaaaatgttccccattgtcctaaaaattatctcttgtaaccttttttttttaaaaaaaggacacagggccgagcgtggtggttcacacctgtaatcccaacacttcaggaggctcgggcaggcagactgcttgagcccaggagttcgagaatagcctgggcaacatggcaaaacgctgtctctacaaaaaaataaaaataaaaaaattattcaggcatggctacatgtgcctgtagttccagctactctggaggctgaggtgggaagatctcttgggcccaggaggccgaggttgcagtgggccgagatcataccactggccactgcaccctagcctgagtgacacagtctggaaaaaaaaaattatacaggattactgcaaccaactttttagtggtggataattggctcttgacttataaagtaggagactagcattaaaaaggtaaacaaatggcctaaaatcataaacctgaggagtgagagtcaattagcttagtcagcacccacccacagcttttccaactacctccatgttttccaaactctacttatttcttcccagcctttcaaggtttccccgtatttgtgttccacagtggttggcaggtacaccactgggaatatgtgagatagctctggatggtacatgaactttaaaaataattagttactctgctgggcacaatggctcatgcttgtaatcccagcactctcagaggtggaggtgggagcatcatctgaggtcaggagtttgagaccaaccggtggcaaaaccccatctctacttaaaaaacacaaaagttagtcaggcgtggtatcgcacgcctgcaataccagcactttgggaggctgaggtaagtggatcacctgaggtcagcagttcgagaccagcctgggcaacatggtgaaaccccatctgtactaaaaaacacaaaaatcagccaggcatggtggtgtgcacctgtagtcccagctgctcaggatgctgaggcaggagaatcgcttgaacccaggaggtggaggttgcagtgagccgagatcacgccgctgcactccagcctggggcagagtgagagtctgtctcaaataagtaattaaaaaaagttacttatatttatctatttatggcaatatttctgaccttgaatttatggaagtgttataggttttccttctatccctcccatcagcagccacagtgatcctcccagtaaatctgcccatatatcacactgctgctgaatacattcccgcagctcccggttacttacaggctaaaattcaaactcccgctcatacagccctccatgagctggctgctggccctctgccagcctctgttacaggatatgcttgtcattccgcacttcttctgcagggacactctccttcctcccttttcacctggtgaactcctactcaaccatcaggacttagctgaggggcaccatctctgtgaagcgacccctggccatgtccggcttaggtggccctctcagattctcccacagccctgaatgtcctcagccaggcgctgtcccacctgatcacagctgcctgctctcctcttgcacccccatgggcagtgagctctgccctttatttccagagtaatctttgaagaaagcggtcatgtcctccctcccttacttgccccatctgagtcagatgagaggtaaagtcttgccaggacctatgagctgtgccctgttggacacctgccttctttttgacctcatctcctttcacaggctccccttcctcccagcttgttcatcgtgatccactcacaccagcagcttgaagttcctcaaactcggcgctcatgcttccacctcctggcatttgcactttcttctctgctgcctggaacaatcctccacaggtaccctcatgatttgctccttcccttcctttaggacttacctcaaatgtcttcttactaaaaaagacttgcccctctttcattctttcatgttatttctttctctctctctcttttcttctttatttcttttcttttttctttcctttctctttttcttttccttccctccttccttccttccttctctccctccttccttccttccctccctcccttctgccttccctccctccctccctccctccttccttccttccctccctccctcccttcttccttccttccttccttccttccttccttccttccttccttcctttctctgtctctctctctttcttgagacggggtctcacactgtcacccagactgcaatgcagtggtacaatcacggctcactttagcttcagcgtcccggggtcaagcaatcctcccacctcagcctcccaagtagatgggactacaggcatgtgccaccaaccctgactaatttttgtattttttgtagagacaaggttttgctgtgttgcccaagctgttctcagattcctgggctggcctcaagcgatctgcccacctcagcctcccaaagtcctgggattataggcatgtgccaccatgcctgcctttcatgttctttcttaactccctttctcttttcctttactccttggaagagtatattttaaaatgtgtttacttgttgactgtcaccttgtctagcatataagctccccaagggtacaggggttatgcgtttcattcattgtcatatccctagtacctagcacagtgccagacacacagcaagtattcaacaaatgtttgttgtatgactcattaacaatccatagttcaaggcataacttaagcacctaaaagaagcattaaaagggctgctctggcctttccctaggcagcaataatgcctgtttacaaaagagttgtcaaaagagccatgttttatccgcaaaatcacctgcaaaatcagtgagcaagtctgtgacgacaacttactttcaaacgaccatttgttcagttcgctgtacaagtcttcaacgtggcctctttcatcacagagctcatctattctgcccataaaatcggccaagaccttcaaagaaaacaaccgcaaaagacacattttaaagccgttgaaggaaaacaaaactttaaagctcactgagctaacttcaggtcttgctacatcgcatattcactggccataatgttattcatcctgaagtcacactaattatatattctccctgggaacccaccttatcccctaatgacctcgtcctgggttatttcctgagcttttcctgaagccaccctgaagcttaagtttcagcttttgatctaaaaataattctggcaatttaagaaaaggaaaacattttttttttctaatcagaatgggggaataaaaccacaaaggaatcagctaactgtccctgttggcccagcatctcaaggattgtgttgcagcagctatcctgaggtgtgcccttccacatctgggcaagcaaacgtctctttattggttggtggttatgttaagcatgttgaacttggaaccagaagatctaccaattctggacacagctccttccctaagtagtctatgaccttgggatagtcacataagacctttggatgccagtttcataaaccagagttttcaataactaatgcctcacatttaatgaggtccatatggtaccaaacactgtacgaagtgtattggttgatcctctgacaaccaagtagtagtaggtaccgtctctactcatttcccatgtagtagatgagaaagctgaggcttaaagaggccaagtcactcacttatgcacacagagctgataagttgccatcctggaccctgccgtgagctggtgtggccatacagcccacatgtgtggatttagtttgcaagtttaatttgcccgcatagcgcatttaaaagttctttgaatttgttaccattaaaaaaaacaagaggtttcatatgaacatatggatttaccactactagtttaaaaatgtaaataataattatgagacttggtgacatgaggtctgcattctgacatggcattcgtttgctggaactggggctgctgtccctcctgggaggggcatgcactatcacgtttcctgaaatttttactgggtctgccttattattttatattagtcatgtgagccctggaagcttctgagtttgcaatccttcacctatatgatcccatctggggacgcatccagttcaaaataaacatccaaagtgaacagaagtaaaaagagattactttatgcttaaaactccctttgactccgtgctggctaagggataatgtccaaataccttagtataatacaaaaatattgttaagacctatccagtatcatttcagagaaagcctcacatcagctacactaaatgaccgattctctgaacacaccacgtcatttcatgcctccctgttttcagaaggctactctgtctgccttaatgccttcccccactttctctgctttcagactcctcctgcaaaacccagctcaaatatcactacttaagaactttacaatgttatctcatttaattctcacagcaaacccgtggggtgggaactgttactcccattttgtagatggggaaactgaggcttagggaaggtaagtggtatatagccaggtctcatagccagggagtggaaagctggggttcaaatccagggctgtagaataccaaagtccacactctccattgctccctcattgtgatatgactttaaaagagggtggaggagggagaaataagggtttggtggggaggaggctgtaggaaggaatggagagaaagagaagacccccactttgaatcacccgaattgcattcttttttcctttgttctttgtagctgtgacttgaagctccaccaatatccctatgtccccacgagccccaggaaagctggccccagcctgcagacctcattgattttgttgtccagcttcatcacttcccctggtttcattagtttcttttgaaaggcactccggacccgctgccagtcttccccttccctgtgagagaagcaggaatacatttagagcacactgaaaagaaaagaaggagatgcagaaatactccagctgcaacttcaggaaccataaaatcaaacaaacactgagaatcatgccaagaaatagccagagaatattagcatcagaatatttgggataaaatagtgatcatcttttgacaatagtttgacaataggatgaaaaagcacctttcctcctagtcaaagattgcaccaaaaagttgaagtccagataatttgggttcagggattttgaggtgtccttgcagggagtggggctgggaggcctggggacaattcctagcggtaaaagggggcatgtgaacaccccatcaccagcaactcagatctgtttgagggaagaatcttgtcttctttcaactcattggtgtgggcttcatatttacaaaatatctcagatttagaattttgccatcgcctccaaataataacatacagtcagagagtcactggagtaataaaaagccttttgcgatcgtgcacttgtaggcacctgccccatagcagaccatacagcctgtgaagcaccgtgaattaatagggtttttaattccagtcattatatcctggaaaatataacgattaggcattacagtttgggggtaaataaaggtgctaacttgttaaatgctaacaactaaaaagcagaagaatcacatcccatagtagcatttgtcgacctaaaacacaactttgatatccctccttattccacctttacaagtagaaataaggcatgtcccccaatcctctgcagaaaatgtcactgtaaaaagccaaagaggctaactcctcgcttttgagcttacaaggtgtttcagggagttttaagggataattttgtttgtataagatgtttgcctggtacgctgacttcagaacctcatcctgcccaagagtctgaacaccacagttggtacaaccctgttttggcgtttctttgatgggagggtgtggccctgccctgttgccagagagaacgcaggtgctgggtgcacagcacggcttttccgtggaccgactctaatctgtacaagagctcagggttgcgatggcacgggagaggggctttggtatccgccctacgtaagaagcttccaaccccagggaactctaactccgcctcttcacaatttccaggcgccgtcaggctcatcaggtctggccgcatgcccaggtccctcggattggactcacaggatcagcagcccgtagccttctttgcggtagtcgcgataggccttccacggtttgatctccagccgctgcgggtacgcgctctcggtgcggtacagcgcttccagcaggcatggcgagcccaggtgcaccgactcaaaggaacccaacttcatgcggaaaatcttgccatacttcttgtggtactccacctgcagccggccgggcacagcgcggtgtcagcgcgcatcctccgccgtgcccgaagcgctttccctcctcccgcctccttcctcctaggggaccggggaccctccctgcccagacgccgaagcgcaccatgcgcccgaggcgcgcatgtcggggagggtttggagcgccactgggagggcggaagagggaggagagagtcaggggcgcgaaaaggggtttaccagggtgtcgtgctgtttcttgagaccccctttccagagaatctgcagcaggctgcccagcagtggccagctggtggggcccggcagggcggccgcgttctgagtctcgccaccagctgtcagcgggcagactggcacctctcgcggctgaggggacgtgtacgccgtagatgtcaccagtctcgggggctgcctcggactgcgcagctgctgcaggaaggcggcaagcgagcggctcttgctgatgggggagctcatggcagcgggggacaccggagcgcgggaaggcaggaggatggggtggggcgaggttggtacgaggtgctagtgggagtcggggcttaacgattctgggaaaaggaagcaaagagggccagctggtgtgatggagcggggtgaggcgggacaggcagcagaaaggacctcggcgaggatgctcgacgctgcaccacgcgacagcctcagagcattggtgcctccttgcactggccgcaggggctggaagagggtggccggtgtctggggacctcttgaaaagggaaagctgggagtcctcctgttggtccgcaaggctgacctctagggtctggctggagccacggggaggtgtcaaggagggtagatgagatgctgctggcgctgcgtttcctcctgtccctctccatgttcctatgcccagggaccatgcatttatggagacagagcatgccctgggtggccaatgagcacgcagaggagggcggagtggcccccggctggccagactccgagggacgcgggacccaggggagggggggtggaaggaggatggagtcagcgaggtgagcgagggcgtccgggcctggggtgaccggggctatgttcgctgggcgcgggaggtggggtgggggcggcagactccaccccggagataacccccaggaagtcatgcgaagcccggagttcaccgggtgtgcttcgaacgcgcctccccgccctcccccggcgggcaggagccggcagcggcggccgtggttgccgcccggcgcttgcacaatcgcgatgccgggcgggcgaggtccccgagtgcgggcccagaaaagctgccggcgtctgccagggccccggggagcccgggcgcctcccggggagccagatacccccagcctggactgaagtgattttttttttttttttgcctttttttttttggaggaagtttggctttctgcgcctcccagggtggggaggatttgagtcttactgaaatgcaccagaagaggagactttcttaacttgagcaagaaggggagtttgtagaatttccttcctgctgtttcatgtttggttgttttgcagattaaatgaattaatgcacgtaaagcggcaacaacgaagccttgtctatagtcaacagtcaataaaagttagttgctgttgttacttctttaggaagttaggaaatgcgccttgagagcgtggcttgcaccaacgatgcttgaattcaggctgggccacctcccctatgtccactgcccgcctctgttcttctacaccgactaccttgtgcaaaggaggggcacacagagcttgaaaccaccgcccccagtactccccctctcccccaaggtgcgtcctaggcaggtccagtgacaaacatacacaatttctagagttaccgcggctggcaagagtagaactcgctttgctaattcaggaacggaagttggagatttttgttgattgttttaaagtggctcgaatcctttcaacctgatccaatacaaaactaccaccagccagggaggaggggagggacattctgtttcctcgccctgcttttcaattacgtgtctcagtcatttttgccccaagtgttggcaaatccttccctggtaaattcttttgtaagcctctagtttgtttcttaaaaatcttttgcagtccaacttaagctttaacaccatcatttctgatttgtctggaggggctaatgactgtttatgttaataaaaataatagctattgatatatactaaactttatgaatcttgtacatatttatatatacattgtatggtatatatgttacagcatacactatagattatgttatatgcaatacacactaaatatacataatatagtatagattgcatacagtatgtagattccatatgttatataatattctcatgaaagctttctagggcttatgataagtcaggcactgagctagacattttacatcattttttccgtttagttctcatctcagcccaatgtcaataaaatgaaataaaataaaaaacaaaaaaaaatcaaagacaaacaaaaaaacccttgactcttacagagctaagtaatttgcccaatgtcacagacgttaccattggctcaggtgggattcagacccaatattttctgattctaggctgggccctaaatagtacacccatatacatcatgctatgttatgtcactttttcttaaaccagagtgtctcagaatattggaagtatttcttaaatgagaattatcaccaagaggaaagtgggggggatcagaatgcctaccatgtcagtatgtgtggggcagtgtgaggcaaacgttttatgtgctgacggtggtgaaaaagaatagctctggctgagtgtagtggctcacgcctgtaatcccagcactttgggaggccgaggtgggcggatcacctgaggttgggagttcgagaccagcctggccaacatggtgaaagcccatctctaccaaaaatacaaaaattagccgggtgtggtggtgcatgcctgtaatcccagctactcaggaggctgaggcaggagaatcgcttgaactcgggaggcggaggttacagtgagccgagatcgccccactgcactccagcctgggcgacagagtaagactctgtcaaaaaaaaaaaaaaaaaaatagctctaaacagaaggtctatgtttttcactactgagtaccttgattctggtgaggtgcttggacacagtgaatggtctattgttatttcaactattgagtaattttcccaattattctttcttttccttctcttttggcagatatgcacaaggagaagaggaaataatttcagacttgctaggtttttctaagagtttcatgctatatagctttatatactctaaatagatatttaaatatatgggcaatcattagttacatgatagctaaaaagaaaattcctgtttcagggatattggtttctcatgttcagtggagaaaatccccagtaatttttagaccggattgcagaggaaagcaagactagttctttgaaacttcattgaccccaatacatacctgtccttgagaagtatgattaaattcaaaatgactatttttgatcccgcttccaggaattcactattcctcatctgtcctcatccttcactcactacttagcctctatgagtcatccggatagggatcttgtcaggaattactaatgagagatcttgaaatgcctcataaatgcctgccatcattactgagacaggctcaggccctctgttttgctctgggaaatcttaccaagtcctggaatggataattagacttcagccctcataccaagggaccacccatgacaacatgtgtgtgtgagttcacacacctgtgtacacatgtataatgagggtggggtggaggagcctgtaggagttcaagggctggtttctctgcactggaaaatacaaaacactttcaagtatatgcaatagtaatatagttttgtgcttaaaactgcttaggcctggcatgatggctcacgcctgtaattccagcaatttggaagggtgaggcaggcagatcacttgaggtcaggagttcaagaccagcctggccaacatggtgaaaccctatctctactaaaaaatacaaaaattagccagatgttgtggcagatgcctgtaatcccagctacacgggaggctaaggcaggaggattgcttgaacccgggaggtgaaggttgcagtgagctgagatcatgccactgcactccatcctgggcgacagagcaagactccatctcaaaaaaacaaacacaacaaactttgcctaaactggggcgtgagtactagatccactttccgttgcggaaacctggaggacttacttgccgcatttgttaaatggacagtgttggttccaacctcacggtaaagttcaagcttcatggaaacaggagtagtaacaatagccaatttcacggggctcctgtgagaacactgcaaataaaattcctaccacagtaaagtgcccagcaaatatgaccttgtagcattactgtattgcatgccttggttttttcaaagtccatagaagggaggcaatttagatgtctctgactcaagaaactgtatacttgaataaagccaaaggaagattagcaatgaaatgctggtgaattcaaatcccagctcagccactgagcagctagaaaaaccagggacaatttacttgtctctctctcagccttagtttcctcttctcaaaagtggcgatcaggacgggtgcagtggctcacacctgtaatcccagcactttgggaggccaaggcaggcggatcacctgaggtcagagttcgagaccaacctggccaacatggcaaactcctgtctctactaaaaatacaaaaattagctgggcatggtggtgggtgcctgtaattccagctgcttggtaggctgaagcaggagaatcacttgaacctgggaggtcgaggttgcagtgagccgagatagcgccactgcactctagtctgggcgacagagtgagactccatctcaaaaaaaaaaaaaaaatggtgatcatggtagtagttcccactccatagggtttttctgaggatgacaaagcactgaaagtccctagcacatgtgctcactgttaatgtcattaagaactacaggaactgggctgtcaaataattaaggtcataatctttattacatgtgtcttggagttctttgcccaattagacaaaccttcttgaaattataggcattgtttttttgtctttgtttttgtttctcctaaagcagatgacacagtgctgtttatgttggccagcacccaataagcaaataatgggaaattgattattgattatttcctcattcccaagtgaaaaggagaaaggttagtatcaatgtattctttgttttctgaggaaatcgttgggaatcctggagggctttatgtgtgggtcatatagaaaatagttctgtatgacaaaaacgatagttttggtctcaaaagcttgggctgaaaccatggctccaccactcattagctgtgtgatcttgggcaagttatttaacttctctgagtctagtttccttaatggtaaaattggagtttactatacctgtgtctcaggaaggtcaagataaatactaaaaatattagacaaaacacgattgtcttcactaaaatctgtttggcctctgtacttgcttgataatttctgagtagaattcagtcatgttggtaaattaaagttatatcacaggtatggaaaaatggaccttaagtgctttaaaatgcagttccgggtggggcggggtggggggaacttttcaacagatttatcactgaaagagctgctttattgcaaaggagatgagaaatacagtatgcacactcaatcattccaccattactacaaattataacttattaaggaactactatgtgtgtggcagacattgtattgtctccacccacacaatagcgctgtaaggtaggttttgttattttccattttataatgacaaaacctcactttcttacagagtttaagccagacctgggttgaatctgccctgttacatattaccattgtttccttgtcctcatctataaaatagaaatcataacagtgtctctcacatattattatagtattataattataataatattatatagttactgccctgtaacttaaagtctagcttgcttcaagatgccagcttcctgaggacaggaagactgtctgtcttaccctctgctgtattcctagcacctatagctatgcccagatcagtttaggtatacccaagaaatgtttgtcaaataatactattgcaaaaataacagcgattaagtgccttacttgttgtaactgtacttgttcaattgagtctatctttctgttaaacttagctcctggtaaaaaggtgtgtctagttgcaaatcttatatataaagaaacattttcttttgtttttttcctattttcaaaatatctagtaaaatagagatctgtgtgagacagatgtgcactctttaacaggttatctccacatgaaaacagagaatttattaaatgaattaatatgtgtaaaatatttgggaagatatagatgtagtataactactgatttaagagtcaagtgaagccagctaatgaaaaaatccattgatttttttaaatgttccaatggtgccatacatgtttcataattcagttttaaaattacatcatcacatagatacctattttatcctttcttgcatgatatgacttggctaataccatcagagtgaaaattggggaaattccatgacaggattattattgttgattaatttggacccaaagtatagtttgctctgctcctatatgtcaaaatcctgcctccacataccatcttattggtgttgacttggacagcattctgcagcatgattgagcttaggatgcatttttgccagagctttaatatgaaccaacaagcatacaccttgataggaaattggcacctaaaggcacctggtggaaagtacctctgtggttagatgagtaaactccagcagtgaatagggatatccggttttttgtttatgaacataaagtggcaaacaaaacaattacaagccaagaaaagtctggaagtgtcctttcatctttgagaaaaaaaaaatcagttagcagagtacttacgcagtctttgtgcagtagcaattgccaaacacccctcacaatccagattttattacttgatttttcaccaacagagaacagcgatgtaacctccttctgatttttgtgccatatgaaacagtggtgtttacagtattgaggaggaagtttctcagagttcagtcctattgcagcttgcatggaataatttgggatcttacttgtttatgtgaatattcacagattcctttagaataatgggactttccattgaaaaaaatgtaatgtgaatttccagtgatttattgatttgttttatactctgtccagttagaattctttggaagtggaatcagtccagagacggttattgagcatctactatgtgccaggcaccattcctagcactagggatacagtgatgggcaaagcagaccaggcacctagctttttggagctcaaattctactggggaagacagatcacacacatgtaaacaaagaaatagtataatttcagataggcataaaactaacatttgagctcagacttaaattgcgggaaatggtcagcttcactaacgcctggaggaaaagaggcagggggcctctctcagcatcttgagctcaaggtgtaaagagaaccacgaagagaatagcacacaggatgctgatcagatgcataaatatatttaatatttattctaaagacaaagaggtcatattccctactcccatctctaaatctaattatcaaatggctcctggttggcatgctttcatattgcagaggtgttttattttttcaagatcattttgtttagtggcacaggtgtgaaagttaagagtctaaatagacatgaagctcttaaaataagaaataaactgaataacgtcattaggattaccttctttatttccaccagttcacaggtgcaacaaggttctatgggctaagcataagaagaatgtaaatgttggtcaatttctcaaacactgcagattacatttagaagttatttgaaggccatttgatcagccaaacacagcacagacacccttgagcacctgcaaggttagaagcacatggctagcctctgttcttgtccctgaggaatctacttgctctcaaatcatgtgtttaaaatgaaacagagctggagtctgtgtgatgaacttccttgggttttacctgcccagcaaccaagatcttgtcttctgattgctgagtggttcacataggctaatctcaccctacaaggcaaagcccatgatttaggaccaatccacacattccttcctcttggctaaagttgagtgcatccacctgggatgaactcatgttccaggttagtcagatcagagtgaatgtggagacttttgctggagcaactaggaaacagaagactctttcccctgggaaggttacttgaggcccttgatttgctggggccaccaagtagagaaggctggcctcacggcaaagccagcacaaaggagagcaaaactaaaagaggagatggaggacagggaagagaagggaatgtcagatcctcatgccatcgttcagggccattcatccatctctggatttcctgtacatgagccaacaaattcctcatgttgcttattccactttgatctgagtttctcctcttgcgatttgaagaatactgactgatatagtcattctaacctatatattgctatttggattttatttatttttaatgataagaaacatcatccgggactaggaaagggtataatctttctggcctcaagcaatttaatggagcataattatgcatggacctagctagagatcccagtcctgaaatcaacagtattttatttctttatttttgttcattttacatagatgttctatccagtatgcttttcaaaaatatatttaattgttggtttggaggcataatgtggtggctacacacgtgggctccagattaggttgccaccttcattttttcacttttcagctgtgtgagcctctctgaagattcttttttaaattgggggaagcaatatttacctcgtagcgttattgtaaggattaagtaggataatataagtcagttacttagcacagtgctggcagagggtaggctcttatttaaattagctcttattattattcaattgataatatatggcccatctgatgtcacgtgctttaatctggtattatttgtgtttatcacatatgcttccttcacaaatcaaccacaagctatctgttactttgtctttccctttaggtatctctattggagatgaacgcatgttcaatacacgtggcctgcctgagtcattagcaaagtgtccaacaactctgaggtactgaaaaatgaaatgactagttaatgtagattgagagtccacatgccagtcacatctcgtctcacttaaatctcccaccaaacttctaaaaaagatgcagccgagatcatgaaactcaggaggacaccaagtcacacagcactcagttgtgatttgaacccccggggatccctgactcctgagccatcacccttgttcacattgagactgcctgtatccctgcctttccacaaagaatattcataacttgtagggcttaaaatgcgcgcccatgacttggatatgaaaaagaataactattttctatgactggcttcatctggctgtgtaacccctattcctgttgtgccacccttgggtaaataccttggagtagaatagctggctcctcttgtggttgggtgtttagctgtttaagaaactcttgagctgtttcccaatgtgattgtaccttttcacattcctaccagcagcataggaaagttctgatccctctacatcctccccaacactccttgtgatcttctaaattttagccattctattaggtgcagagttctatttattgagtcagtttttatgttgtgatttttcaggaaatctgtccatttttttctaagacattgaatcattgacatataattgcttatcatatgtctttattatctttttaatgtctgttaaagctgtaattatatcccctctgttattcctgatattgtttttgtttgtatgtgtttctcttttctttttttctttcattagtcttaccttgggtttatctattatagtcatcttttcaaagatccgactttatgaaatttctctttgtttactatttcatagatttttgctatgatatttattacttcacttgttcattctgttttgctcttaagctcccaatatctggacactgttatggatatcttatcttgtatggttattgatttccaatttaattccagtgtaactggagaacatactcttaaagcttttaatcttttaaaatatattgagacttattttttcgatccagcacttagtttatctgggggaatatgccactgagcactgaaaatgaaaatgtattttgcagttgttgagtgtagtgttctacaattatcaactgggttgttttccatttattccttctgttgttgttggtactactgctgttagaatattgctctattcttgcctttttggagggggttaatcaaatctttaagcattccattttatttatttgattgtcttctttgctataactcttatttgtttatttttggttgtctagggcaaataatttgcattcagaatgtatcaaagtccatttagagtcaaaagatgtcatggccttcaacagtacaattctagttatgcatcccatttttttgtgtgttcttgttattatatcctttacttctacttacgttatagattccagcttacaatgctgtgaattttgctttagtccttttaagaaaattacaggaattacaggaagcataactttttatgtttagccatttattgaacctttctggtgctgctccctcccactgaagatccacttgatctttctttcagccagaagaacatctgttagcctttctgggactctcgtctgctttttcacttaatccagcagtttgggaacagcatcaggcctcttgttttgtttccagttgcatcctcttaacagcacgctctaagggtgctttatccaatattgtaaaaggaaactaaagcaagatttgttttgaggattgcttggtgcccctttaaaaaaattagacaccaacccaggaaaagagttggaaaaaagtaccccaaaattttcccatttacctaggctgtctttaagaccaatatcagtcaccagcaattaccttttgttcccagacaggaaaattgaatgactgcatcaacgctaaaaagcttggattgaatcagacactttcctcagaagtgaaaaatgcctgaccacaagccctagttaatttaaggccacttagatggcgactccaggagaattccaactcagtgccccaagatttctcagggacttggatttctccctaacctactggaaaagaatttgtcatcagcaaagctcttccgtagagaaacttgagataaaatgggtctttcaacagggctgtgattgtgtgaagggatataaactggcaagaattgtgctcctcattcttgatggaaggttaacatgattaggatctccagaagtctcatatagcaagattaaattctattttgcatactgaagtctcagatactcaaatttccactagcatgttagattctcagtgtgctccctttatgtgggaaatctgtaacaaccacaaggcacactcaatccttcctcaggcataggcacacccagacccacccacatgcgcacacacccatacgtccacacgtgcacccaggcacccgtgctgcatgccctcacatgcacagccccacatgcaagcacacctccatgcaactttcctcaccaacacgaacatgcacccacattacacacccatatctattcccccacatgcacctcttcccacagacacatcttccacacatgcatgccccccgcacttgtgatttaatggcacatatgattcagaatgtctgtgaagccatttccaacctgtttttgtaataacctgtgcttctcagtccaaaagatagtggaacgtatgtttccaggaaaatatgaaacaggaatttctcaatctcctagcagcatccccaccctgctgtactaatattagtccatgttgccaatagcagcagcccatgtcagactggctgcctctcctccccacctaatccccacttttcttgtttgtaattgaagaacaaccgactgtatctcatgctcgggctgaccaatgagtaagcaaaagtgttatgcggggagacagccttctaattctgcagacattattaaaataatccaacacaggtacccgtgcaatcaattttcagtttctaggatgagagatatgtcaccttgccttcaaaaggccaaacctggctcgcttcattggctcccttctcaatgtctgatacaggacccaaaaaggtctatgcatcctgtggcaagaaggtggcatcctcacaatctgggacctgactctggtgaaaagtgttgtttagggaacagatgcttgatctttttactttcgctgctcgccaccctttaagaggaaaatcttccccaaatctctcttcaaatcaaatgccggatgtcaatggttctaaactaaagctgagcccctagaatcacctgggcagtgttttgttttattaatgctgatttctagcccctacctgagacctactccatgagactgtctggagtctctatgagccagaatttggttaaagttacctgggaaatcgaggggaagccaggtttgggaatcactggccaatatggtgatgcctgtctagagcctggacttcacaacccagtgatgtcaaccacacttattccacccatcgtgcctcgagatgtgggtccacgtgcagggggggcctctgtgcatggtggtcagagagctcgccatccctctttgtgtgctcttacccagctctccaggcagtcaagggctaaagggagaggtaggtgggagctcccttgagcagaggggcctttgtagggtgatggaggctcaagagggaatttcctgccctgttctggagcttgggcccccagtcctgcctgaagtcccagggtccacagtggcacagatagagacagctttccggaccttggagaagaatctcagtaataaccgggggcagggcggggtgctaattaccaaaggacactcactccctacagagttctcctcccgaacacaacttgatggaaggtaaacacccacacaggacatttaaataatgcccaagccggaatgcgttgataaccagtggcgtggacattcggcagctttccatttccagaacatactcgactgtggagaaaagacgatggtagctacctgagggccttagcatttgagccctggtaggtgagggaatctgtcagagtgaataataaactcagtactcccaaagaccacagcctcccttaatggtgtactccataaaccctcctgatttttttgcaagaattccacttgctctctagttctgctacttacattttccataggtagtggttaagaccagaatgagagaaacctgcttttaaggtatgagactgggcaagtgagcccatctttcttagacacaattttggcttctgtgaaatggctgtacttacttcatagaattgcttcaggaattaaataagatcatgaatataaagcatgaatatacagcatcaataaatattggcacataaatatcagtaaattactaatggtaaattactaaaaattaaattaactgaagccagagaaaagggaattccttagtttcataagaaatgtttatggtagatgttttgagaaggttaatttgtggtggaaattttggccaggtggcatttttatatgtataattttataccataattatatgtatatgtctttagaaccctccatcatgagagaagaagagaagattacttttgtgtgtgtgtgtgtgtgtgtgtgtgtgtgtgacagagtctcactctgttgccgaggctggagtgcagtggtgcaatctcggctcactgcagcctctgcctcccgggttcaagtgattctcgtgcctcagcctcccgagtagctgggattacaggcgtgcgccacaaagcctagctaatttttatatttttagtagagacagggtttcactatgttggccaggctgttcttgaactccttgcctcatgcagtcctcccgcctcggcttcccaaagtgctgggattacaggcgtgagccaccgcgcccagcctaaaagattactgaagggaatatttatataatatcttgaaaagcatgcacctagaagcaacttccaagggtcacagccacctggttagctttagagaaaaaagtgcctaaggtgttacattttcaaggatgtttgaagaatgtgagtggaattttctatgcagtttcacagggagagcaattatttgggtgtccttcagaattcaacactacatctctctcagtccatcctaatttaaggcactttccctgctgcataacttcattcatgttagttctgcttctagtggaaatggggaattcatatataatagtatttctaatgtttaggtttaattttttaaagttgtgaatttccaagctctcaccatctccttagatcttcacaagtcatgacatatataccaggttgaccaccattttacaaataagaaaattctgagagcagagaatttaaatcctgtctttattcagctcttaccataatcccccattttccatcttgagtatagtgtctttccatacctttgttgattattgagttttccttacatttagatgacaaatacgactccaaaatacacatttatcttgagtccttcgctgaccaacatttgaacctacagtatttagagaaatcctaaaacagacatttgcactaattccagaagctgaaggggctcaaaactccgggctctcagctctccagtggctagagatcatgtgactaacctcagccaatcccatgctctgtctggaggtgttcagtgtgcaaagaaacattgcagacttcagatacatttggtggcagcagccacagaattcagcgtccaatgccagcagtctgttattgcttgtaatagtgtccatgaatatgaatcaaaccagactttccctttggtataattttggccacagtttggctgcctaatttccctagatgcctgcttatttattcaggcctggttgtccagccttcttatcaattctacggactccccaatatccatcaacaaattccattgctgcataaccacgaaagacatctgttcttcataaacaagaaatgcggccatcgcaaccacatgataaataaaagaggcggtattcttcccagatgtttcagggcatcttctcttaaaccttcagagggtcctgagctgctcatttccgggacttgctgagccctgacagtaaacagacttttaacaaagactcgctaaatgttcagattttttttttttaaattaataagagaatggtccattttcttttcaaatcttaacacagagctggcaggatgtcccccatagagttcagagtcagaagttgtttttgatgcgccgacattccgtttgtgatagtcttgcctctatccggcacttcttaggcctcatctccttggcctggtttgtgcagtggttaaaaggggttgatttaatccagaccacctgagtttaaatctaactttccagctttctggctacacaaccttgggcaaattgctcagtatctctgtgtctgtttcttcatctataaaatatatagattttgataatacctacatcctaaggctatgaaaatggttaaatgagttaattcatataaagcatgtagaacagtgcctggctggtagtaaatacactgtaaatgtcgtctattaacatattatcctcacctctgatgcatacttgctcacttaccttttcttttctcaaaaccacctctcataaaataatctgaaattccttattgatctcattcaaaatctgtttctctcacaggcgtatcctcaaatgaagccttgtctctgtgaaattcctggtaagagaagttgaggcatcaatagtggatcaggaggtatttttaggggaagaggagtctcagtattcatggaactcaatgagacctccacctacacaaggccaaggctgcatatggatgtagagaaataaaactcagatgttgaaaagtatctgaagagatgatagcaaagggaaattatcttttatctttcagataaatcgtcattttatggaatgccacaggaagaagttttctttacaagttctgaagacttgtgatgaatgagtccatagtttcacctttgaaaatgtccctgggagtgtcaaccccatcacttttacttatattacactcataatcagttcatctcgccaagaaaaataatattatcctcatgcccaaacttgtgacttgatttgaaaaccagtaaatcagaaataaaacttcccatgtgtttttttcctacatgaatccaagtgactcagatattgtgttattcaataagactattaccatgactcaggtaaaagggccgtttatattttctgaagtctcaagtctagggtccaaaataaaactagcatcttttatagaataatttttctctaaaatgaaatgtgtatgtcacctggttgtcaaaatccttatttaaatctttaaggagaaaagcaatggtttggagagtggacttaagcaattgaatcttggattcaaatcatagctccagattgtatcagcctctataactaagagcaggtggcattacctttcccagtcttggctttcttattggtgaaagaaaaaaaagagaatattaccagtcttgaaatgttgttgcgtgtattcctacttagcagggtgcctggcacatatatgcaggtaatataaggctctgcttcgcttctggccaaaacttcctggcacaggaggacatggttctcagatgtgagaacatgttctgtcttctgcaggaaaccagaaggggttctcccttctttgattgcaggaggaaagaattctaatggaatccatatgttctttggccccatttaaaactccacactctggaaaagtagatggtgtcctggagtgaatcccaaagtcaggcccactggaaagggtcactgggctttctcctgcttcagtggcctgggattttaaaagttggaaaagtttatccatacaactttattggaaatgattgttttttattctattcttgcccttttatggtataaagtctttgcttttatgttgttaattttagatttaggcttctttgatttcattcacttccttaacaaagtaaaaagttggcaactctttgaagttgctgcaaccatattcccaactacagcatccttctatgagcctctgctctcttaatgggtatagcccaagggctagaaatagaccaattcttggccaggcgcggtggctcacgcctgtaatcccagcattttgggaggccaaggtgggtagatcacgaggtcaggcgttggacaccagcctgaccaacatagtgaaaccccgtctctactaaaaatacaaaaattagctgggcgtggtggcacatgcctgtaatcccagctacctgggaggctgaggcaggagaattgcttcaacctggaaggtggaggttgcagtgagctgagactgcgccactgcactccagctccggcaacagtgcgagactctgtctcagaaaaaaaaaaatagaccaattctttttctctaatcaggtaaaatgaacaaggatattttattttaattttttaaagacaaagtcttgctctgttgcccaggctgcagtgcagtggcatgatcatagctcactgcagcctcgaacacctgagttcaagcaattctcctgcctcagccaacggagtagctgggactataggggcgtgccaccatgcttgctaattttaaaaatatatgtatttttggtagagatggtgtttccctatgttgccgatgttggtcttgaactcttggcctaagcaatccctcccaccttggcctcccaaagcgctgagattccagacgtgagccaccatgtttggccccaggaaatttataactaggacaataaatgaaggcacaagagaccaatcccagttgttctatcctctactattctgtcaaccaactttcaagaaactaacattcgtgacatttataagatggtggcctctgctgcatgccaatcttgtgaagtacacacaggggcatgccaggtataagacagtaattacagtctccaacacagaacttcccggaatggaatcacggctcaaagaatcccacaaggaaagacaagcaagtgagcgtgaaaagccagatgtgaaaggcagcagaaatgcttcacgtgaagtaagtaacttatggaagctctagaaaagcaggaagggattaaacatgcattgattacgatatgctaaatgggctgggcgtggtggctcacgcctgtaatcccagcactttgggaggccaaggcgggcaggtcacgaggtcaggagatcgagaccatcctggctaacacagtgaaaccccatctctactgaaaatacaaaaaatcagccttttactcctaagcactgatttgggatttgagaaaaattttacaaaaaatcagacttttactcctaagcactgatttgggatttgagaaaaatccagctcatccgtctgatctggcctcttgatctcagaagctaggggagaccatttttgctccacacataactaaagccaatagaggaaggtggtttgcagaggtaaagaggattgaagcagttgagcagacagcacagaggagaaatgaggcaaaggtctgatgtcctaatggtttccatctgcaatctcttccaaaggcactttctgatcaagtagcaatttggactttttttagttgtaagcaacagaaactggcccggctatcctcatccataaagattgtattgcattcaaaggcttgcaaaagtgtggctagatgatcaagcttggggtgtggggaggattccaaaacggaaacccaccactgatgcatggccagaaccccccaccagaggatcctgctgtgaagaattaagagccgtggatccatcgacgccaggtcatctacccaccctctggctgctggcagtgggaagagcgagttggtgcccttccacttctgtagttgatactggggtcctgattgctaccggggtgctctggttatatatcacactccagacttggtggtgtgaaacaataacagtcttttattattatcatacctcatcatgctgggagatgactctcatctcctcactgaggtttcctgtgcagttgcagagagttggtgaccggggctagattcaccttaagtcttcctcactcaagtctggcagttgatactggctgagagctggggtctcagcagggaccattgattggaacactgctgggtgcctggacttccttgcagcacaaaaggtgggcaccaagggttaatgcccccagagagaacaaggtaaaactagattacctcttctagcccaaccttggaagtcatatggcaacttctgcttctgctgcacttttttggttagaggggactcaccagataagtccatattcaaaggaagggaagtaggcttttgatgggaggatatcaaagaatttgcagaaatgttttaaaagtacaattgcctcaacacgaaggaatctacttgatttcctaaaactagaatcctggttgctaaaggttccataagacaccccatatattgcttagcaaatcaccattcattgtttaaagtagttcaaattagtttcaatttcttgcaggcaaagacacccaacggaagcattggattccaagacattgaattccttgaaaggagagatttaaaagtacctagaatacaaccttccatatgacatttattaaaattggacaactatactttgagaaaatgattgatatgaattacagtgtgattgacctatggtctcagatccaaaccgtaaaccctacacattcccacggctaatcgttttaggaatagaccaatccccagatagtaagtgaagactcaatggattttggaagtcagtttggcacaaagaccctggaacagcttccggggctagaggtggagtttcctgttgctgaggtggaagatcacgagacaatcaagaaacatgcctcttccatggcttgaggtcaagtctaagcttgctcagtatctgttactctctgattgaacttccctttaattctcccatcagccaagctttgtctctgaggtcttataggaagtttttggcaaagtggcagaggtggtgaaggacatcatgaaaaacctggagccaatgaagcagaaagacttattctggaatacatggtgtggcatcctagaaaactctagatatgacaggtaaaaacctgtggagggaagagcgcgttaacattcaacattgaagtaagttaacctcaacgaatggttgtttggttgacaaaaaatagacccaaacagagtgatattcagccagtatcattcaaatacctgtgggttatctgaacaacattcttgctttcaatttcttaatgctcaaattgcttagacattttttctttcccaaacaggtgggtaaatctaacttttttggtgtctctcttggacatcccagttaatgctgatagttaaatttatactagacaatcccataggaagctgcccctcagagatccgcctgcttcctggagacacttctgacattcttcaaaattgccagataacatttgaatagctctgcgttagaatagccaataacccctgcattagaatagccaatgtaatcactgattcttcagctgcactccagagccttagggaataagttgcatgaaaaattttatgtgtatataatatataattatatatatatcatctacatatatttatataatatataattattattttatctacatatatttatataatataaatatataaacattagtttatatagttatagagaacagagggcatagcatgggtgagtgcccccagagagaataaggatggaacaaatatataataaatatctatatttatatatataaacaaatggaacaaatatatataaatattatatgtgtatatgtatatataataaatatatattttagatatttatgtatacattacatatataaatatatatatacatatagtgaatcaaactcgctatagcgagtgctcatgctgtgaaagatatctgggaaagagactgatggagggaaccgtatacaccccaggctagactctaagctttttgagtgtgggtgtcatatctgttttgtttgccagtgtatgcccagaacctagcacagtaagtgacacctagatgacaggacggactttgcaggcatgcagcccgtgtggtcacacagggtcctgcactcagaagatccctgcacatgactcagtgctctactgttgccatcctgaaattgttaatagtgtttgaacaagaggccttgggttttcgttctgcactgggcctcacagtctgtggttgctcctgatgacattcaataactatgtgttgcatgaatgagtcagaggccaaggccaggattatgttcctaccctacccttaaactctgggtcaaggtgagagtgttcctttaccggaatcgaaggttcgtctctcttgctctcatttgctgttttcaggctgatttttccagcaatgagtaacagcaggggccatccgtttacttcaagggaaaactctcctccccatgtgcagctggtctgacccggttctgcagcaggacaatttgccaagactttgatgcagaaaattcccttaaggggacttatttggtcgtaagtatcgtgtgtgaaagacatcaatatttaagtcctggttgggcttcatcagattcaaccctgttcttgtccagttttatcaaaatgtataaagtctaatcttagggaacaaatgtgcagtgatgctaatgaattttaatagcattggacgtctttgatgccttgtcttatgtcctcctgacctatcttgttgctctggcattaagttgacaaacagctgtggccaggtgaacctgacctcagtagtacctcatgtcctggggcttttctactggccacaggcagcacctgcagccatctagcgcaagaccaaacctgaaagtgcaggagaggtaacacctaccggggcaacccttggctgaatggggctgggtggataaatgctgtctctgtagtgaggacagttctgagggacaggtgctggagaccagagggtttgcaggaggagcaagctccagcggcccacagggtcatcagcccagtggcagcccttggaacagcttcctatcttcacctttttcacgtttcctccagcttccccagatcccttcccaccatgaactccctgcagcaagccctcgtctcaggctctgtccagacgttaatgtagccgtgacgcatcagtgagcactcttttgattttaagtgacagataactaaaccaaactttcctaagcaaatgaattcaatgactcaagtcattgaaaagttcaaggggacagctagctgagctctcagtgtgactaggggaatgctttctatcaggccctgttttatctctccctgttcctcagtttcacttctgtgttggttccgtttttaaatgagttcgctcctgatatggcaagataccagccactatgccagaactgccatttctacagcttcacagcaaataggaagagagggcttctggctcccattggaatcagaagttgaggctctgattggcctcagtttggttctgtgcttattcctgaacagtcatgtgaccatgagttgctgaatggctgacggctgttctcaggctccaccactaaggtggtatgacagtccacccagatcacatggactgatagggaggaaggggagggtcctcacattgaaatcagggctattgccagaagagcacgaaatgggtgtcgggaggcaagcaccacatgttcaggagaactaattcttcttgggcagccaatcaaatgtggagtctgataaatacaattttgcttcccattccccatcagcaaagagattattacaaaataaagtctgtaatgatgagttacagttggatataaacctattaaaataatgcattatatagattaattccctatgtatgcattattcaagtgcttttaatacagttccccccctttggggagtgggatcttaaaataaaaaggagaaaagttttcattgctatgttgtcctatatatcttgtcaaattatgcaaaaaatacatgtagacttgtttcacaaacataactagatagcataattacttgggtggtactaaaatttgtttgaacaaagttagttctaaaggaagtgaggcaggattctttttgagaagtataatatttaatttttatgggtatgggaaaatacagtgtagatgagaataactacgatttgtatccttattttatcagataacagttatataaggtatagaaacttagaggcattacccaattgtcctgagcctcctttcaccacctacaaaatgaaaattatacctatagtttgaactgaattaatttgcaaaattaatttaagaacccaaagtatatattaaatgcttaagagaaatacagcctctttttaaggccattgacaatttagggactgcccctcctcctcatgtcttcgcagacagcttttccggagcttagcaagtggtagctcgcaaagtactgaaatcttctcctaggatccatgtcctacactgctacaagaatcactgattacattggcaattcaacatttattaggtcaaatggaatccatcgtagccaggacctcagctctccttcagtatgctcagataacacctgaccgaatatgggaagaggctcattgtgtaaacacaaacgtggaagtgccttttattaaaacaagattttacctgtagaaagatttgagcattcaatttgcctcgaggtagcatctttacctggaaatgaaatctcattctgttattggagccaatgtgtttatgtcaccattggatgcaggaacaacttaaaaaataatagtatacatatgttatgattaactctaaacttttgtttactttaaggataagctaaaaaaactcactattgtcaaaaatagcttctgtaatttgttcttttcacaagaagtaaaattcttgtgttattttttattctctgtaccttgcgaataactcataacttaggagttcccaagttatgttcattcctccattgcaatctctgtcccacccttccctttctttccatttccgttgcaatgtaatgtaaggttaagagcatggaatgcaagaggtgccagtttcaactctagctctactgtttctagctctgtgtcctcgagcacattatgtcccgtactcttgcctcagttataccatctgtgtgtaataatgataatactacctcctttatagggttggttaactaatggtctgttttataaaggtctaaaaacattgtatacgttgaagggcttttaaaaatgctgtacttttagccaggtaaaaattcggttaagaattcaaactagcaaaagatgattctactttggcccaaaggcagtggtttcctgggtttgtgtcatcttgctttgcagcgtgtagacaattcttcaggagttgcagagagaaaaataacatgccagattttggggtcacagtgccatctgctgaagaaaggagtgttgctcgaacaatgagtccacatgatcacaatttgcgtaagtactaggcctagccaaaaaacaaaacaaaacaaaacaaaaagaatgcaataagttatggactcttgtacattgtagtggagtgaattcctcaacagcttacgctgtattatatattactgtattaatctctaaatacattatcacttatttattcatgcattgatttattcattagttaacatttgttaagcacctactttcctgttggtgccgcaacaacagagatgaagaaaacaggcatgatctgtttcctttggtgctctcagtttaacagggacacagaattcaaaagggaatataccagggaggcgtagaaagctgctttagggggcagcggatgctgctcttgtctgggagatgggtgcgtttgaggaaagcttgtgtcttagtcagtctatgctgctacaactaaagtcctgagtctaggtaatttataaacaatagagatttattcctgacagttctggaggctggaaaatccaagatcaaggcacctgtaggtttaatggctggtgagaggtccagtctctccttctaagatgccaacttgttgctgtgtcctctgcagggcagaatgctatgtccttacatggtagaagaacagaagagaatgaaccttgatatggtttggctgtgtcctcacccaaaatctcatcttgaattgtaatccccataatctccatgtgtcaagggaaagaccaggtggagataattgaatcaagggggcggtttcgcctactctgttttcgtgatagtgagtgagttctcacgaggtctgatggttttgtgtttggtagttcttcctgcatttattcttgatcttgccgccctgttaagaaggtgccttgctttcccttcacctcccgccatgattgtaaggttcctgaggcctccccagccatgtggaactgcgagtcaattaaacctctttcctttctaaattacccagtgttgggcagttctttatagcagtgggagaatggaccaacacaaactcgttccctcaagcccttctataagagacccaatcccattcttgagggctctgtcctcagacttaaagacccccgcctcattgtaaaaccacattggccattaaatttcaactacgaactctggaggacacattcaaatcatagcagcttccttgatgggagtaacatagacgctgagtcttaaggataggcagacggtagaatgcagctggctgaacaataggagaaaggcatcataggcagcaggaaaagcaagtgcaaaggccctgaggcaggagggagcgtgtagcattcacagaatggaggcccaagagggtgaagcacagtgagtgaggggaaagatggtccaaaacaaggtcagggagggaggctaggccctggtaagaaatttaagtgcaatgggaaaacaatgaaacatttcaaacagcgttatggaaaaaccatttgcaaaattgtttagctaaatacaaactgacagtacttaacattacccagcacagtaagattcaaaagaagtgcaaaatattcggaaggtggatttgaatgatttaagtctggggaacactgtcatgttcctcgggtgccctctgcaggcgccaaaccaaattgctgcgtgatcctggggatttgctccttcttgcctctcactcctcatggccagcatggaagaggaatctgatcaaggtttcctttttaaatcttagaaccaggagcctggagcaggtgttgcaggttttggagggcacccaggtgcgtactgccaggaaatgatgtgataacctcattctcgctttgtgacaaaatctaaattaaactgggacatgtctggacaattttgtagcttacataccaattcaaacaggttttttttttctcttcattttccagtcaatatactgaccatttctgtccttatatcttcctcacggagtgttcctgatggtagtcacacagtcttttattataattttatgagttcttgttggagcgattaatagcatttatactaataaaactttctaacatactgtataatttacttatatgttttggttatgatctttttcctatcaatagaatgtaagctacatgaggacaaagagttttgtctgttttttcagtgttatgccctcaatgctgagcacctgcccttcttggtccaagcaacatcccactgattccacagtcctcagggaccactccagcaagattcaagctctttctcccctggactcgccccagggttgcagcttctggtgctgtgactttggtcatatgtttgccaaccataagcttcatgatgccaagcaccttgtctgctttatttttctgcttgcaatagcacctagcatggtagaaatttcaaacaaacacacgcataaatgctctcatttaggtatgttaaaacagaaggctgggagttacaagttcatatacctggagggcctcacaggtgagcacatggatgggcaggtgccctacatgtacctgtgtgcgctctgtgagtgggggggtctgccaggcccaggagagagcctgctggccgaatgtgccaggccaaagcagcaccagcagctgcccatcaggcagaaacacaggtgcaatgtcaccaggatgctgattgtaccagctcaagcaaaactaaaaatctcaaatattggttccactaaagaaaaataccatatgggtcaaagaaaacatagcctggatccagtcagtgggaggccagttttcaacctggcataagggaaagtctttccaaatggtcattgttgattctcctccctgacctgcaggatccacatgcttccacttgtaccccatgcttctccccggagagccagggacagtccccagctggagaaaggaccagaaacaaaggtcggaaatgctccacatcaggaaatgagaagatgctcagcagacttgaaagtccctgtaccatgcggacttgcagaacgagtttttctgctaggagagagattagctcaaaggatagcaaggtctggggagaggagagggacaagaatgatgagaaatagaatgagaaggaaaacctctaaagcaaggggaagataggggcatcagagggagctgagtcagcaccaagactgccaggagccgccactgtcctctgtccagattcaatgacactgccctgtgcccgcagactctctgcccagtgccttttctctctgcttttgtatggtctgtgtggggaactaatgcatggagaagcgtgcaccatctcatgataatgatggagcagccaaagcctcatagagcatccgattggagccatggcttctttgagcccagccaaagggatccagcccctacctccatatcacctgttagaggagacagtgccccctagcccttctgtctctggagcccctgtctcctggtgcaatttctcagctcagtgactagctaaccaggcacttggacattaaggaagcatggtgatgaataagtgggccctgcatgaggcaggcttctcagggtttcttggcagcacatgtattagcatttggaccaatctgattttattttattattgttatttacatttatgtatttatttttaatgttgtgggtacacagtaggcataaatatttatggggtacctgagatattttgatatgggcatacaatgtgtaataatcacatcaggggccgggtaccgtggctcacacctgtaatcccagcactttgggaggccaaggcagatggatcagctgaggttggagtttgagaccagcctgaccaacatggcaaaaccccgcctctactaaaaatacaaaattcactgggtgtggtggcgcaagcctgtaatctcaactactcgggaggctgaggcaggagaatcccttgaacccgggaggtggaggttgtggtgagccaagatcacgccattgcactccagcctgagcaacaagagcaaaactctgtctcaaaaaaaaaaaaaaaaatcacatcagggtaaatagtgcatccatcacctcaggcatttatcctttgtgttacaaacaactcggttacactcttttagttattttaaaatgtacaataaattattgttgactgtagtcaccctgttgtgctatcaaatattagatctcattcattctagatgactaatttttatacccattaaccattcccacttccccgtcccctagtacccttttcagcctctggtaaccatcctactctccatttccatgggttcagttgttttaaggcttttagctcccacaaatcagtgagaacacgcaacatctgtctttttgtgcctagcttatttcacctaacataatgtcttccagttttatccatgttatagcaaatgacaggctctcattctttcttttttttatggctgaatagtactccgttgtgtataggtgccacattttcttttgtattttcattttactttaagttctgggatacatgtgcagaacgtgcaggtttgttacataggtatatgtgccatggtggtttgctgcacccatcaaccttcatctaggttttaagccctgcatgcattaggtatttgttctaatgctatccctccccttgccccctacccctgacaggccctggtgtgtgatgttcccctctctgtgtccatgtgttctcattgttcaactcccacttacgagtgagaatgtgtggcattttgttttctgttcctgtgttactttgctgagaattatggcttccagtttaatccatgtccctgcaaaggacatgatctcattcttttttatggctgcatagtatttcatggtgtgtatgtgccacattttctttatccagtctatcattgatgggcatttgggttggttccaagtctttgctattgtaaattgtgctgcaataaacatatctgtgcatgtgtctttatagtagaatgatttataatcctttgagtatatacccagtaatgggattgctgggtcaaatggtatttctggttctagatccttcaggaatcaccacactttcttccataatggttgaactaatttacactcccaccaactctttatccattcgtctgttgatggacacttaggttgtttctgaatcttggctattgtgaatagcgctgcaataaacatgggaatgcagacatctcttcgatatactgatttccttattgggggttatatacctagcagtgcaattgctggattatgtggtagctctatttttagttttttgaggaagctctctactgttctttgcagtggttgtactaatttacattcccaccaacagcgtatgagggttcccttttctccacatcctctctggcatttgttattgtctgtcttttggaaaaagcaatttttagctgggatgagctgatatctcattggagtttggatttgcatttctctgatgttcagtgatgtcgagcaccttttcatatctccatttgccatttgtatgcctgctttagaagaatgtctattcagatcttttgcccatttttaaactggactattagtttttttcctattgagttgtttgtgctcctcatatactctggctgttaatcccttttttcttgccttatttcttaattaaatattaaactaaatatttagtttgcaaatattttctctcattctgtggtttgtccaatgtaattttaaagtcctaaaagaatttaattcactgactcttcagtatgttataacctgaacttcttggctgattttatgggcctcagtgttagacagcacctaaggatgtgtcatgttaaagcctcttggtttaacctgtctttgttctcacctgccattggccacctgctccaccccagcagctcccacagtgaccagctccacaccggccatggtgtgcagacttgcagggctgcctctccgtccagttggctcgtgcttacagcctcacaccttgttcctccacctgggggcttccctgtggaaggctgaggtgagaaaaattatgggagcctcaatgagcaacctggaagtgtctgggagtgaggtccccgtggggccagcctttgaatgggaggcaggaactggcaaataagagttctccccagctgaactctcctgtgttctggttaacacagcctcttacaggacagtccccagagagggagcaaccagtcgtgcttgataccaagcaaaggtcggcttggtgaggcctcctggtatgggctctgctgccttccctgacctgcttcattccgctttttcctcgctctggctgccctgggattgtactccttaatgaagaagcagtatctaggcctttgccttggggtctgctttaaagattccggctgggatggcttctaaccattgtcattcttctcccccaggatgctttccaatttctacacatctgaaatggatgctacagtctcaaaaggcagcactaatcatggccatgggggtagttagcagtaataccaagccaggggagttcttgaagaggagatttgaaagatcataacttgggcagtggaatttcagacgcaactgggctgaactgagaaagtaatcatagctaacatttcctgagagcttacaatgcattttatttgcacgtattatctcttctactctttgcaacaagcctattagagacacattattatttttgccatgaaagtaacttgtctaacatcaaaattagaaagtggtgcaggtatgatttgaacgcaggcagtctggctccagtaagccctttattgagtcttaaacactttactcatgcaagtcaggtgacaggagctgcaatgtccactatgagctgcccactcggggacacatctgactttatacatgacttgtggtgatgggtaaagcctggtgcttaggagagtggtctctggagccaggttcaccaagagttcgaacccaggctctggtacttcctggctgctggagccttggccaagtagctttgtcctcctgaaactctatttcctctcctgtaaaatgatcgataacaatattgtgtggtatggtgaggattaaaacatttagcaaggtgcaggccacatagtatgtaccctgtcagttttgtatgttactgttactattgcattagtccgttttcacattgctgataaagacatacccaagactgggtaatttataaagaaaaagagatttgatggactcacagttccacgtggctggggaggcctcaccatcatggtggaaggcaaaaggcgcatcttacgtggtggccgacaggagagaatgagacgagagaaaggggaaaccccttataaaaccatcggatctcatgagacttattcactaccatgagaacagaatagaggaaaccgcccccatgattcaattatctcccaccaggtccctcccacaacacatggaaattatgggagctaccattcaagaggagatttgggtgggaacacagccaaaccatatgaactctcattattattatacttcagcaaaaggcaaaggttaacgtaggtgagagtttaggtcccttctggtcctaagatctatgcacctgaggattgaagtgcttctctctctcaaagcccctatgctactttcggtccccaccatacaattacatttcctcaaaattcctgctccgctgttcctcagctttcaactcagccatttctcaataaagctttgaaaaagtcagaattctttctctctttctctctctccctcccccagtttggcctcaccaagttctaaaacatgcccagatctggcccctgccttgcaccccagcctcgctccatgctgctctgtcctttctaccatgtctcaccaggctctttccctctcagccctccacccctggggtccactttcgtctcctctccccatgctgaggcctcccattttctcttagcttagaggccagctccagagctggcccccacccctcccctctgtgctctgcctcagcacctcatttatctccttcatgcacttggtaccatttgtgacaattttgccctttatttctgtctccctctccaccatttgtttcttgcagtgcttttacattgagctctggaataaacagatatcactgatggagcatctcctatgtgccagacccggtgctaagatttaaccctggaaaaacatctttattcaacaaatacttttttgagcacatatgagctacacactggaaagtcccaatactaagggcctggagagcccagaataggcaggagaacaggcgatgcccgtggcgggctaggtggttcggtggggagggcacagggtgctataaggtctcattcccctcatttaaccaaagaggaaattgggactttgagaaaggaggaggcttgtcaggggcagttctcaagctgtggcccatgaacctcgggggtccctgagaccttttcagggatccatgagggcctccctttcccaactacatgatttgtatgaggctggggtttttcatacctacaactaggcaactaaacagtgtatttggagagactgaatgcagaagtagacatgagaatgtaaccttccattaagcctgatattaaagagatcagtgaaaatgtaaaatgatgacaatcttctcaatttatttttgtcttagaaaatatagttatttttaaagtgtgatttttattaccatggaatggagttttatattattttaaatgaattaataaatacattttaaaaattctgctttaatttctaatacagcaaatatcgataaataacccacataaacaaaagttctttggagtcctcagtaatttccaggagtataaagaggtcctaaggcaaaaaaaaaaaaaaaaattactaattgggagacacaagtgtcagaatatacagtaattgttcagtaatattgctgtaaattaattaataggattgcctagtcacaacagcaaaggcatggaatcaacccagatgcccatcagtggtggataggataaagaaaatgtggtccatatacaccatggaatactatgcagccataaaaaagaacaaaatcatgtcctttgcagcaacatggatgcagctggacatcattatcctaagtgaattaacacagaaacagaaaaccaaccactcatgttcccacttatgagtgacagctaaacactgggtactcgtggacataaaggtgggaacaataaatgctacggattccaaaaacggggaaggaggcaggggaaaggggttgaaaaattacctgtggggtactatgttcactacttgggcaacgggatcattagaaacccaaaccttagcaccatgcagtatatccatgtaataaaccggcacacataccccccgaatttaaattaaaaaaaaattacattaaaagataggagtacctcctttacaccacctgaattatcatggcacataaatctcacaccctatttgccaaggccattcgttcctagctgttttacaggtaggttagctttctcaatgcaagtctgtgggacggatggagaaaaattccccgagccctttgatcctgccccagctgggccccgccgcgctgagccttgggcgcgccccctgctgcccgcggccggagccgttcgccacacccccgtgtttatgtcggtccacgggggttgcctgtccctttaattggcatgtaccaagtccttccaggtcacatttcctccctacgtcccagccgtttggactcactggccaaaagtccaagaggacggaatgtggagacagtgttgtatttttgcggggagttctaggccgaccgggagcgagagaacgctcgggggcgaagcgcgccattgcggccctccccgccgcctgcggtagtccagtcccaagatggcggccaccatgaagaaggcggtgagtggggagctcggggctctggatgctcgggcggcgccggatctcggccgctggggcccgggcgcgggatgctgggggtgcgcagctccgaagcccggcgtgggacccgaggccgaggccgaggccctgagagcggtcccgcggcaaggcctgctcgcgcctggcgccctgagcgttttcctaggcacctggccagccgaggcggggcgccggggctggggccgggagcctcgaaggacgcaggtccgcctcccgcgatgccgagggtgcccccggggagtctgaggaacctgcagccccggcctcgcccctgaggtgtgggaagccgaaggtcccgttgagtgtggttggccttgactcgggcgttgcaccggcatgatcgcattagcctcactggttatgggtagctgctgctgggagcgtggttacgggtgaggaaactgaggcccagagatggggagtcacctgcccgaggttacgcagctcataacggggacagcaggttcctgcatccccagattagcaggccccagagaccctgtgtccaacctggagctgcccatttccacgcttgatgcccctgagtccttcaggctaaaaccagtatttattgagaatggaagatgtgccgggcccagcagccggccgtttatctgttatcctccccgcaactcagcaagtgcaatgggttcctctccactttgcaggtagagaaacttagacacagagcagttagaggccctaaagtgactcagctagtaagaagcagagctggagttcaaactcaggtttgtttttgtttttctcaaagcacgcctgtgtaaccactaagccggctaaacttccatgtggggtttttaatcccgtgagccttcccagatgtgtaaagatagtcagatagaagaaaaagaaaattggagagggggaaggagataacggctgataatttggggagctttacagtgtgctaggtacagctgtaagttgttttgcgtgtattgtttattttatgttctttgagggagatactgtttttatccttatttaacaatgagaaaacaggcgcggaggcaaagctagcatttaaacacaggcattctgactccggagtctgtgttttaaactgctatagggggtctttgatgagaatctcttggctggagggatttgcgttcattccacttttaagaccacattagaacttctttgctttgcccctatccagtaccacatagtctatgccatctgtgcctggtgtagggtgacccattgcccccttttatatgaaattgagggactgccaaaaatgggaaagccccagccaactcaggatgtgttgctcaccctactattctgccatccaaaaattcttactgtgtcccagagtagggtctagggccatggtgattcaaaaaagtatgaaactttgtgagattcacttcacctctagtttgttaaattgggccctctggtgttaggtatggcctttaattccttggaagatactagttgtggttcactccgttttataggtatggaaactgaagtgcagagaggtgaagtaaatggtagaagaggaaatggcagaagaatgatttgaaccttggattttgattgcaaaatttctaattaccaactttttttttcctttcattgattcagtaaattttcgggggcacgtaatatggcgtagtctcagttttaagtggagacaactgtggtgaccagtgagaaagctcttctccccttaatctcatagccccaaagaacgtatgttccagggcagagcaggcattactcagatagtcagacagaaaactagtttctctgatgagaactgtgaaggaaaagtgcttatgaaatgagggccaaaatgaggtctgttttgagatcagagaagactttcctgggaaagtgccatttaagttgagatctgtgagattatgtaaggaaaggaagggagagttggatagggagcgaagcattctagagaggagtatctgcagagactctgagtgcatttaatacaaggaaggcccgatggcagataatcaggggaagagagtttgagccatgatgggaaaagaacttatagaggggtaggtggtggccaaaatataaaggagcttctttaactttggaggctttaagagtcacatgatagatgcagtgtcctcctgtagatgtttccagtgttaggaacaattcccgatagattagcttgcatgtacacttttcccctttgccctcactaggagaaaacatatgtgtatgccagtgagtgagagtgaaacagagagagatagccctttgagtttaattaaaagcaaatcgtacaatctggagtactttacgtttgtaacacatcgtatctctcaactggtcatgactttgctggggagagtgtttagatgagatgattcagtcctctcctctctagagttctgccttctaagatccagttcttgaccataaggagatctgcactttgatttctgttcattatcctatatacaaatgtcctttcctcagagaggctacctttgacctttatctaaagaagcctccttcactccccaggcccccaaaactttctactcctaagctgttttattttcatcatcacgtttgtcaccattgaacattatcttgttcatcttgttttttgctctcttcctccaccaggatgtatgcttgccatttgtattcatgaaagtgggatagtggctctcttgtcacagtgcatggcgtataggaaacagtaattgttaaataaactactgcatggatgaaagttgaatacaaaaattagctgggcatgatggcgtttgcctataatcccagctactcgggaggctgaggcacgagaatcgcttgaacctgggaggcagaggtcgcagtgagccaagatcacaccactgcactccagcctggcgatagagcaagactcgtctcaaaaacaaaaaaacaaacaaagaaggttgaatacaaatacaaagcaaaagtttacatcatacagacttggtagatatgtttttaaaagtaaaaataaaagactgaaattggccagaatttatttctagggacccagctgtcagtgcagactccgtgtaatacctagacttggtgtgaggcatgactgagtatggttcagtttcctcctctaatcccgtaagatattagttctcaagaaaagagcccagggaattttaatttttactttggatcccgagcaggcatatttctctttggcctagcagaatttctttctagatctggatctgttctttgtaatgatttttgataaacaatattcaggatgtaaaatgcttagctatcatttgactgactccatcatcaggctttctcctacatgttcattttatcaaccctataaggtaggaactagcctctccattttacagatgagaaacctgaggtggttccaaagaattgggtaatttgcccaaggttcctgtttgcttggattggattgcagcctgactcttcccaccactctgtgtgctgcctcagatactataggatatgagttcttcctagagttcttctgactttgagagtagctacagctggtttccctgaaggcaggagttcctaaccttttggggttgtggatccctttgagaatctggtgaaagctatgaagaccttccagaaggatgcacatactatacatgccattttgcatacagtctctgggtatatcgacctgtcaatgtccattgaccacccccaccccccagttaagaattacccacttctggctgggcgtggtggctcaagcctgtaatcccagcactttgggaggccgaggctggtggatcacctgaggttaggagttcaagaccagcctggccaacatggtgaaaccccttctctactaaaaatacgaaaattagccggacatggtggcatgtgcatgtaatctcagctacttgggaggctgaggcaggagaatggcttgaacccgggaagtggaggttgcagtgagccaagatcatgctactgcacttcagcctgggcgacagagtgagactctgtctcaccaaaaaaaaaaaaaaattacccacttcttgccaaaatgcagcttcaagaaatgtaggaatgttctaggacagtgagactaaaacagaagcctctgttagccatcaaaggcactgacatcttactgtctgctgtaaatggcactccactgggcggcatgcagtatatttgactcacacatcaactttagcccttaaccccagtgggaaaaccactgtaaagatctggataccaggggccacatgtgtgctgatgcctgtggtttggtggggctacaacaggaaattcctgctttggaaagacagaaagcagatagccaaattctctctaccacattttggaaactatgtgtttgagtctgatcaagcatgatttagattcaaattcagaaaccatgtattagccttagttatgtgccaggcagtcctgcactggatccgttcatgtgaatggctctgttgagccctcaccaagacaaatacatctataaatgcctgttgggggttcaatatttaaacaaaatggcatatactcttcaggcaaacaggaactcttcagaattctctgctgtctatttgcgtagggaattgacagttctcacttaggcaaaatgacttgtgtgccaagatatagactttggtttcttgagcgtagctcagtgttccccaacttccatattcatcaaaattatgcatacggttgaacactcaaagctagacatagtgtgatgtaaaggattttttcaggctatcttctgggttgttgaggtggggcataatgcatgtgaaattgtttcttggaatgagagcctaacaaaggggaggactgtgttatattccgaccactgagctctgtattgcttgacactgcctttcaacctctgagaaataaaagttcacataccttaagtcgatggtcatgagagaccaggtcagggatggagtgtgaatgttgtgagctcattactgttactgcaaaagagccaaaagtagtgtttcagtatgaactatttttatacacacacaaatatcttttcttctttaaactagaatcaggtgctctggttttcattttataaatggaagggaaaccctaaggagagtctggttttatgttttagctttattttttaaaaatatatggtacctccttgagaatctgatgaaagcagacatcctgctgcctcttccagatgtgcctaagcctgtgtacacactcacacacacacgtgcacactcacagagacgcacgttcacattcagttaccgagaactcatggacctgtctgacctctgaagccagtctgcctgggttgaaatcaagttccaccacctactggctctgtggctttggccatattatataaagtgtacctcagtttctcaatctgtaaaatagtgctggtgatcctccctaataagatggattgcaggattagcagagataataaagtacttaggaagttttggcacatagtaaattcaatcagtgttagctatttttttattatttcattggtactttatgttatccaagtactctttatttgcaaatttgtaaatttaatcacattaaatattaatttttaaatactaaacattcaattttcatcattttttagtaaagtagaccttattaagacatttaaacaggtcctacattataaacataatttttgctgtgaatggaatagagccactgaaatgtacagtgaccctttagccagtaagctcatgcaagttttagctctaagaaaaaaaaaacactactctgagacatttaccaatatatttgaccatgtaactttttgtttcctgggtcatcttaatgaaagaatgctccaacttgagaaattctgctctgtgccaaaagttggctttttttctttccttttaaaaggacttattaattgttctttatgtttgcaatatgtttatagcttaggaattattttatggagtatcagaaaaggttatagatttacaaacaaaccttaagcttgtggagcaaaaaataaggcatttgttatgttctgtacttcttgtgattcttgactatatgagtgcaaatggcttattgagttattgttgagaaatataaaaagctaactgataacttctccgttaaaattttacaaaaacttaaacacttctttcaggctgcagaagatgtcaatgttactttcgaagatcaacaaaagataaacaaatttgcacggaatacaagtagaatcacagagctgaaggaagaaatagaagtaaaaaaggtattgaaaataattattagaagaataaaatttttttatactatagctactaaaactgaactcagttaacaagtgaatatatatttctctgggctgtttgttgcagatgaatgacgcgatccactctagttaagcagaaagtcattttttttttaagggatatgcgataacttacagagttgttgaggagcttgagtctagaccgaggttccaggaacaagtctcggagaacttggctggcggtggaacagctgttgcctccactgatcccagagtcagctgtcttcccaatgaggaagccacccttgcagacttaggaacaccaagctgctgctgccagtgccacctaccccagtaaatctggggcctgtgtccagccgtcccccttgagttgaaatccagctcaaatgcatttgattggtggaattgaagttattatcacttatgcatgctggcagaactttcattacccgcatgatttacttacaccctatcagcaagcaaggctgagaaatgtaggctggtttttttggttttgtttttgtaggaaggcagaattcacaaagtcaaaaattgttaaaatagaagaaattttgagtgaccatgtgcctgctgtccaccacagggcgcttattgtccagaggacaaagctttaggtagctctaagtgcttgcttgtgaaatgtcttctaaaaagttacaaattaaggtcttattctaatgtggtaataatacctttgtgagagggtccctcagagagttgctgtccccaaattacaattggcctttagcttctatcagagaactttgagtacattttctttgccattttgcatttatagaaacaactccaaaacctagaagatgcttgtgatgacatcatgcttgcagatgatgattgcttaatgataccttatcaaattggtgatgtcttcattagccattctcaagaagaaacgcaagaaatgttagaagaagcaaaggtatgttaaaggttaattctgaaattagaatttatatcactataaagaacatgtaattatagatgtagggaaatagtagatgctagctatagctaatatttactgccttgttatgtcccaggcatgctccgaatgctttgccagcaggattttgttgaatcataacgatgacctgttatcccaatttagggacaaagaatagaggcttagagaggttatgggatttattcaaagtgacacatagacagtggtcttctgactccagaaccttgctcaaaactaaaagtatttagaaggtatagcatatattgaagcagaaaagaaaaatcccctgtaattctgctatgcagaggtaaccattcatagtgaacattttcctgtatttcttttatgttctctctgcctctctccgtgtagtttgcttcccagttgggacaattaatgttccaggaggagcatttttgctggtttcattgaatgtttgtttgtccagcagatactcattggaagcctgctctgagcctggcacacaggcctttaaaaacatcgtttttgaagactgtttaatatcatgttgatggttatcaattggggtcacgggtcttattgttagcattaatttgtttccaatattttgctgtactaatgttactgtgagcattcttctacataaatctttgttcacatttagaaaattgttttgaggaaataattagagaaatataattactgggtcagtcagcatatgagttctctgataatatctgagacatttgatacatggtatgaaattttcagttcacatgccttcttactatttgggagggacagccacgttgtttgtctatgagaagcagatggcaattaaacctttcctaatgcttttgctaattaacctgattgcttaaaatgatagtctctcttcaaatgtcataaaaagcaaaacttcgtatgaatgaaacccacatttagtaagtcttcagaagaactatcactcctgggtctttccatgcataaatcttatatgtctcccttatgtttaaatcttttcttcttggtcaaattttgtgatttttgttctttttatttgtttaaccatttaaaaaacatttttattggaagtattcccagatagcttatggtttttgtggctattgtgaatcccctgccccatacacagatagctactgaacttttattttattttatttatttatttatttatttattttttgagatggagtcttgccctgtcgcccaggctggagtgcaatggcgcaatctcggctcactgcaacgtctgcctcctgggttcaaacaattctcctgcctcagcctcccgagtagctgggattacaggcgcccaccaccacgcccagctaatttttgtacttttggtagagacagggtttcaccatgttgggcagactggtctcgaactcctgacctcgtgctcgtgatccacccgcctcagcctcccaaagtgctgggattacaggcgtgagccaccacacccggctgaacctttctttttttactcattctagaattctagaatgaatggagtgcttactctgtatcaggttctgccatgtactagggataattggggacaacaaaacctgcctggcccctgcctgcatggagcatatagtctagatggaaagaaaaaaaagtaaacaaaactgataatgagtagaaagtgatatgaggatagaggtggctttaagaacacaggaagaggaatctacactagtctggacatcaagggtcagggaagggctcccagggaaagtgatgggataacagctgaggaataagtggctattagccagaaaggggcggcggggggcggggggttctagtcgtgagaagcaacatgtgtgaacggccataggatgacggtggtgcaaacatagacctgcaagaagatgtatttgctggagattgggagcacctgaaattgtggccacatcttggagaactccagtcagttgagttgaagaaattgtactttgtcttagcaggggtcagcaaactttctgtgaagggccagaagtaaatacgttaggttttgtgggctgcacagcctctgccataattactatgaaagcaagatgagtgaatctgcgtggctgtcttccaataaaacttgacaaaaacaagcttcaggctagattgggcctgtgggctatagtttgcccactcccgtcccagagcaaagaggagccttcagagatttttggaaaagagagagatgattggacttgcgatattaaaatgactttctagtgtcttattttacttattaaccaggttttctcggtatagaaatttagaatttatccctttctagtagccatatgtcttatttttgtttcttgttttgtaacagtgattctcaaacttagcatgcgtgagaatcacagtcaccacagggcttgttaaaaatccaggttgctgggcccgacccaaagacgatctttcaggtgggctgaggtagggccccagaatgtgtatttctaacaagttcccaggtgattttgtccctgacactggtctcggggccaccgtttgagaaccattggctagatttctaaaacggcaacactgtcagtattagatattctttggtttctaatgttagtgggtatttggtttgtgtgatttcatatttttttgtcatgtttaggaaaaaaaattgttttgatcctagccaggaaggaacttaatggcttttttttttttttttaaaacaaagagtatatgttaaaatttatttaatctattaatgagggaagcattaacattacaaaactggttttagaattgaagaggctaagtatctatagataggtaggtagaaagaattgtcctttggaattgtattttcttttttttaattataaattgacaatttataattgtataaatttatggtgtaaaacgggatgttataatttattaatacaatatggaataattaaatcaagatagttaacatgtctatcacctcaaatacttagaaaatatctgagttttcactgggcaaagctgctctttcttacaaatgaggcactttttaccactcttttccaaagtttagctccagaggcctcaaagttagtgaaaatttctgccagatttggatcataagttgttcttcttaattattggtggttggtggtgtgagtttctatcatttcctgtagtctcatagttatttttgttgttggaaaaagctgggttagaagccagcaggcccaggataaactatttatagaagtctttgtatttggttctttgttaggaaataatttagacagtaattttttactattttttagatcagcagaaactgagaaaacaaacttgatttattctgtgataagcagatatggaccatgaattaaaaatgcccacattcagacatttagatctaattatcagtgttacttagctgcctgtccaagtttagaaggttcttgacctaaaattcttcccaaatattatttcagacacagatgctcagaaatcatcctattgaatagaattaatttaaaatattttttttccagaaaaatttgcaagaagaaattgacgccttagaatccagagtggaatcaattcagcgagtgttagcagatttgaaagttcagttgtatgcaaaattcgggagcaacataaaccttgaagctgatgaaagttaaacattttataatactttttttatttgtttaataaacttgaatattgtttaaaatgataattttccttcttcaaatgacatggaaagcaaaactttcttttttaaaaattttcatttatttaatggaaacttgcccattttcacatgtctgcttatttattttatatttttaaaagaagacagtattcacctatgtattttgcataacgattatatcaagtctaggggcttcatgtcatgttattaaaatcagttaagcaatcttttatgtttctatattatttagaatatttgttgttgcaattttcacataagaaaatttaacagttgtgtcatgttgtttctgtctgattttaattgctgtctaatgacggggaaagcacgatgaaaagatgtacaatcctgcatccttgcttatttcacaactaaagctttgtcatagacttcaaaatatatatgtatatattttatttaaatatatgttacatattatatttaaacatacatatttaacattttttacatatctatcaatatcagagatttgggtaaaagaatgggtaatgtttaaacatgtggaggcatgtggagctttatacaaacagggcagaaccacagaagaacgttttagaaaccaagagatgtgcagaaagaaatgtttagtgttttttcgttttaaattttagattttattttagtgctttgtaattaattggggtttatattgataaagatgtggaagttaaacagctatgtatgtaaaagtaaggcttatttcttaaataaaggatgcatttcttcccactcccccacaaaagacaaacattttgggatttgggagacctaaatgtattaactttccagcagatggcactgatgtgccaaatgtgaatggaaggatcctaacacaacaatgagattgttaggattaaatatacataattttagaggaaatatttttaatttttaaggctaaactgcatatgtattttttggttcagtgtttataaacatgaattcaggcttaaagatagatgattatataatttctaaaattcttaatactataaaggcagttttttcttttcttttttttttttgagatggcatctcactctgttgtctaggctggagtgcagtggtgcgatctcggctcaccgcaacctccacttcctgggttcaagcgattctgccaccttagcttccagagtagctgggattacagggacttgtcaccactcccaaataattgtatttttagtagagacatggtttcaccatgttggccaggatggtctccatctcttgatcttgtgatctgcccgcctcggcttcccaaagtgctgggattacaggcgagccattgtgcccggccaaaggcaaatttttaaattgctgcaaaaatcttcccaaatagtgatattccagttctggaaaatgactcttaccaaaaaaatgcaaggatatttttttcttgcatccatttggttaatgttcagttagaggattgaggctggggaggtagtcaatcaagttgcagcaggaaataagatcagaataatttgaggaaactctcaccaaagttaacaatggtgccgggtgaccactagggtccttttggaccctcaaaggccaggggagagagcaactgcccacttcactccctgaccagggaaagttgcttttcatctggggaggaacacagccagcctgtgtcatacctgcagtggtagagccaggggactagacatcctgacctcattctccctccaaaatccacctgtgtcccaccattggccaaacccaaccagaatccggaggtggtccatagaagtcagtcgcctgcagggcctgggaggggtggggaatggataggtctggggatcccccagtggaagatctagcataggagggcgactaaagtttagccctttagaaatgttaacaacgaacactcgcctgacatgggccaagagactgaactatgtaattcactgggacttcaaattttgtcctgcatattatcaagaaaacctaatacaaaaacccaaatatctaacatcagtgggatggaagcgtgtgatgttgctaacttcattttcttaacttacctgtgacattttagaacattacaaatatttgattcccattttaagttcatttctaaagcctttgcttatttttgtgaatagtaacttccctgggctagctgaagactggggaacagcacgcggtgcatctgaagggaaaggaagaaatgtcagcttcagccagtagttgcgacagagggaagttttgatctggatttgtcactaacttcttttttttttttaagcaggaatcttgatttgcatgtgcaatcactctttttagactgggccactatttgttttttaaagcagtgcaggctacacaacagataattgcacaacagatctggccctgagactgccaggttgcaaagtcaggtgcataatatgatacgtcatgtgcaggcttttcacaggaagtggtagtagaagtcttctgagcagctatgctttgctgctgactgtaatgtttcattatctctcacatccattaatttctttccatctccacaactactgtgatccttgtccaagccttgtgagctctagtcaaaagcatggctaagtaagggagcaaggggatggaaaagccatttgaggtagggtttcgacagggggtctctaaagggttttgaatagaaaggagcagtactttttaataatttggcagttgttaggtgggctttactgtagaaagatggaggtagaaatactggatgttattgtaccttttctggtgagccgaatcagttggctgaagaaaagatacaccaggacttagagaaggggtgaaatgaacaaattttgtcaatgattggagaaacgaaggtgaagctagaaggagaaacccaaagagaagttggttttgagcacaggccagtacagcttgcaacaggttttctttggcttctatagtttaacaaagaaaaaaaaaaccctgaatttgttgccacaatcaaatccagagatctcacataaaaatgcacggtttggcaacattgaaaccatatttctaaaaggcagtcttcagctgctcatgcgttagacaaagcaggctgtctccagttcaccccagtccccacctagcccactaccctcatttatattacctgcgtggtgcctgtctgtatttgctttgtaatctctggatgcctgctggtagtgtaagcagaggcaggaaagaaagaagtgtctggtttgcaggaagcagggcagaggagggggagggtgagagaagggcacgagcttggcatcagcacttggacttcccagggcatcagccacgtggagacatgtaattggcaaccggaaaagtgtgttgaagtttaggatatgcgggactagggaggtatatttgagaacccttttcatcctacagaagggcttaacatttaacgcacataaaaatcacccggggattttgtgacactgcagactctggctccgtgtgggctcgggctgagatgctgcctttctaacaagctcccaggtgacgctgctgctgctgagccctggtgccatgcattggacagctaaggtagcttgccacgaagaagaggacgtggggaaaatgcaggtgggaggaaaaagaaacagcaaaggagacagaagctgcaacggtaatgggagatccgcaagagtgtggaatcccagaagccatgatgagaatgctgaaaggaggagggagtgtgatcaacagcaaatagtacagtggcgaagccaataagagccgagaagatggagctctatttgatgactaagaaggcccttatttccttcaaaagagttaacccacccctactccttacacacaaactggagctccaaacaccctagaccccctgacccgaggcccccacacctgagccccatacccttgaaccccacacacacctgagccccacacacacctgagccccacacacacctgagccccacacacacctgagccccccacacacctaagcctcacacaaagctgagttcccataaccctgagccccgaaacctaagtttccccacccctaagacccccacatttgagccccacacacccgagtcctacatataactgagtccccatacacctgaggcccccagactggagcccccatatactcaagccctcccacacacgaactccccacagagctgagtctccatgtacctgatctccccacacctgagctcccatatacctgaaccctacacacacctgagacccccatacctcagcccctcccacatctgagcccacacacacctgagttccacacacacctgaggaatcagctccctcccgtcaggcaccagtgattctcgggggtgataattgtgtggtttgaaaaagcctgaacacattaggtgctgaggatcaaaaatacatgaacaattctctagttcagcgtttctccaggtgtgaacatggaaccaacatcacctgggaacttgttagaaatgccaagtttttcacaggactaaaccctgaaaaaaaattcccccactgggcaatgatattgagcaacataatggtcattgccttcaaagatgacttcatagcaactctgcagacagggcccagggttttaacaagcactccaggtgattctgactcagcgaaagagctggtggggttcaaatcattccatctttctgggattggagggcgtgggggtggtgttgggggaagagactggagcaccaactgagaattcttaatgcagattatagtgctggagagggtaacaaaagagggcagcatcaaagagattgacccatccagtttagggatcgagggtagctagaagcattccggttgctggtagtaaacagattataaaagattaagcagtaggtggtgtgagacttggaggcagcaagtgaaaagtatttttacaagaaagttaacagtggtgggaaagaggcagagcatcacttaatgtcactgtggtgcagatggaaaggctttttttttttttttggactagggaacacatgaatacacacagtagatgagaaggagccaggaaagaagatgatggaaaagtcaacggacaagaggtaatagttggagcacatctgtgaaagaaaggggtgctgtagtgcttatacaaacggtagactgggaaaacacagaattaggtgtatatgttacaaaaactcctaaggaataaatggtagagaaaaaaatttagaatagtgatgaactgtaggaggaagatatagttggggtaggcaaaaacaggaggaggcttcaataatctttatgttctatttcttaagttgggtcatgggtccatagttattggtagtcaatatgtttattattaattattttatgtacatgaaattcttcacaataacaagtttttttataaagttctgttgtggcacaaacaaactaggaaaaatgtgcattactgtggcattgttattgatatttctgtattgcattcaactacttttttgtcatttgacataaaatggatcatggtgactctccagttttgttttgtttttttcttatagagacagagtcttgctctgtcacccaggctggagtgcagaggcatgatgttggctcagtgccaacctccgccgcccgggttcaagtgattctgttgcctcagcctcccgaatagctgggactacgggcccatgccaccatgtcctgctaacttttttgtatttttagtagagatggggtctcgccatgttggccaggctggtctcaaactcctgacctcaggtgatctgcccacttcggcctccgaaagtgctgggattacaggtgtgagccacggcgcccagctgactctccagttttaaaagtagaaaatcagcaacaaccaaaaagttaaaagttggcttacagatttggtatagaaaattgtttgtgcaacagtcattagcatccgtttgtatgtagaaatttctggtaactaagttctttgatcctccattctggtatctaggaataactctagtgatggcgacgttaacaattagctttgagtgcttattgtaggctgtcagtcttctgaattttttttatatattccttcctcacaagagccctttaaagtagattctttaccatccctcattgtgcagaagtagaggaaggtttagagacgttaacctgccccaagttttgcagcttacttagcaaatgggtggttaatgaatgcacaagttgtacttttgaaatttattttgttagatgattttatttgtgttctgttacttatccaaaggaatttcagatcggttctcatatagacatataaaagtatatgtgtgtatatataaaaatgtaaatatagcattaatagattaggaaaaaagaaagggagaataagttggtcacagagtccacctttcagattgatgtactctgaacctctatgtagctaagacagagaaggaaaaatgatgagtaataccacattggaaagggtgttatatatgaatatctcaggagacaaaacatctttcagaggtctaaaccttaaaaaaaattttccctcattaggcattgactttgagcaatgtatcagatgctaactttaacaaagacttcaaagcaaaggcaagagcaaaattcatatggccaattcttgtagcaattaaacagttaacctaaatccaagggaaataatttagaaagaggccgataatacgcagccaacatccacagatgtaccctgagctaggcattagatatcttatgtaccctgagctaggcattaggtaagtattcacatacattaatcattacaaggtacaaactagtattatcatcatgtccatttacagatgaggaaacagaagcccagaccaaagttccaaggcccctaagtgaggagccagaactcaaacccaaacagtggggcttccaatctgtcctcccaaccattctattgcaatattgaagaatcttcttacaatcttcccagatccaaggacagtccataggtcacttcaaactcagaatttctcttcaaataggaattagagagcagaataatgatggcctttgtctatgaattaaattaaaagaccttcttcctaggaacccattttaattcagtcctataagatagcaaaggtatcagattatacccacagaacacctggaattctgaacttgaccactgtgcacaataatattgggggccaggcttggtgagccaccatacaccatatggagtatggaggctaggggtgggtagatcacttgagtttaggagctcaagaccagcctgggcaacatggtgaagacttatctgtacaaaaaacacaaaaattagctggatgtgtggtacatgcctgtggtcccagctactaggaagactgaggcaggaggactgattgagcccaggaggtcgaagctgcagtgagccacgatcatgccattgcactcagcctgggtgacagagcaagaccctgtttcaaaaaataaaaattataaaaggaaaggaaaggaagaaagaaaagtattggggagggataggttctattgggaagggacaatgaacaccacagccataaattctgattaattttgtaataatacctctgacattcacaatcttattgtaacttggagtaacgctggaattattggtagagttcgataaaacctatagtaacacagatgagcaagtgtactagaaaactgaattaaacttttctcagggtgtgatactgatggaaaataattgacctgaagaggacttgcagttaattaataatctattaataattgttttaaatcatttgactcaaacttataaagtccaaattatagtagctgatagtggcataagaactgctacactcatgcaaaaatatgaaacttatgtccaagaatcttggtctgcttcacctctcccatccttgtcgctaccaccttgggctaagaggcagtgagtgtttatttggactattgctggtgtcttctgatgggtctcccagcctccattcttactcacacacgtccccttcaatccatttttgtagccagataatctttctcagactgcaaatctaattatgttactctttctttgataaccacctcctcccccctccccccaaaaaaattaatgttctcccccttggtgagagtagtgaaaatgaaaacacctgacacagcctgcttggtctgaaccctatctacttttccacttcccctttgctctccacaccaaccacaccagccttatgccagttccccaggtttattatgcaccctttggtcatagaacctgcatccttaccaggtcaaagccccagatatactttcatagttccacatgcttctcctttgttgcaagaacagctattacatttatattgatcattgcaaattattgacttgtcttcctcattagactgaaatcaggaaccatgataatgctttgcttattcccatcttcccagcccctgcctaccatgaaatcaagcacacgacagtgctcaatctacactggaatccaacagttctgcttgatatggtttggctttgtgtccccacccaaatctcatgttgaatcgtaattccgaacgttgggggagggatagggtagaaggtgattggatcatgggggcagatttccctcttgctgttcttgtgatagtgagttctcgtgaaatctgatggtttcaaagtgtgttgcacttccccctttgctgtctgtctctcctagtcacccatggtaagatgtgcttacttcctcttcgccttctgccatgattgtaagtttcctgaggcctccaggtcatgcttcctgttaagcctgcagaactgtgagtcaattaaacctcttttcttcataaatgactgagtctcaggtagtcctttatagcagtgtgagaatagactaatatactgctcctagatgtgtacctaatagacatgaaaacttgtgtccatcaaaatacgtattaaagaatgctcatgcaatagtcctggtttaccctagggggataatgtgcccaggccatgcttgaaaccatggatggtactctatatatataccattttttcatatatatatatatctccatacctatgataaagcttaatttacaaattaacacagtaagagattaataaaatagaacaattataaaaacatactgcaataaaatttatgtgaatctgatctctttgtctaaaataatattttattgtgctgtactacgggtaactgaaatctcacaatgtgaaactgcagataagtggggacttacttgggtagttttattctgaacagccagaacctggaaacaataatattatcaacaggagaatggacacatacattgtggtctagtcatacaatggaatacaacacagcagtgaaaaagaacatctcattatgactgcaaaaaaaaaaaaaaagcctgaatcttacagacatattgttgagtaaaaaagccagacacaaaatagtacattctgtattattccacttatatgaagtttagaaacagtggagggtagggaaaggtcaccgcttagtgaaggctaatagtaacaactatttatatggaacatttacaaaatcaccagcactgtgcagagaatttgacatgatcctaactaagtcacctccccagagcttaccctggatttttttattatccccattttttagattaagaactaaggctgtgagcagggaaataccttgcccaaggctacattgctggtaagtgcaactctgcacaatctcacggtatcctgacaattactgttagtcatttcttacagtgctgcacaagacacgtctgtcattgttttgccagaggactgtgtgagataagatgctgagcattcccccacaaggcctaagacatagtaatgactcaataaatatcatctattatgatcagtcccatgaaaataaaaatagaggctccacgaggtggctcaaggccatatagctaagtggcattgcatttgtgcagttttgattgtgagttctattgttcaaattgattctaagtgacttacatagttactctaaatgcagcaccacgctatgattttcatgggtgttgagtatttttgcctgcctgagccccttctttcataagccaaatattaaaaagcatattttatgactgccttgggacaggcaaatgtaacccaggctggattatattcaccctactttctgattttaaaagaaactaaacattttcataggcccttaaggtgccatgggccctaggcattctgcctcctgtgcctaacagggaagtaggccctgcctcaatgcagatgagattgtcacgtgctgggtgaggatggtgggtttcttctggggagtggaagaggctgtggttgaaaaagacaactgaagatgaattctttgttgatgagattatatttgtcttgttcttttttaaaaaatagccatacataaatgatttagccaaaggcatgaaatgtcatttgggttcaagtgattgtgaagcgtttttgatttaacaaaaaatcataaaatgatccagaaaaaataggagactgcaattcatagaaatgctattttgtgcgattttatctgatttggaatggggttgaggagaagtaattgatgaaatgttatgaaatgctagaatttaaataggcctgatgtaaataatgaagcatgctttcaggctttcaaaatacacaattctagtctcagtttaaaaagtggtcagttggagccaatctaaacatatatagagactgatagcagcaaccatggcatagaatacatgtttccttcaaagttttaaattacctgtttgcctagagtctgaaccctgctagaaggcctttgaaaaagcattgaagggggagaaaaatccctcaaacaacttacatagtatttgtccatgggatttgaatggctcttagctagtaactggtgtttgcaatcttttatggaggtctttaaaagcaaacaaacacataagaacaggggactgaagtagtatactgaacacattctgaatgttatggaggacacaacaggatacttacacatcttcattttgtgcacttaaccatgactgcgtgctgcacaagacaatgggtaagtgtaacatatgagttaattttggcattatggctgctattaatgcaaaaccaggacaacacaaagacaatatcacacctttccattctgtcaagaatggtgggtgcaagtgctctcaggacccagtaatagaagagcagatgaatgtaaaaccaacaggaaagccatcatcagtgcaaagaaaatgggtgcagagataattttttttttttttttgagatggagtctcactctgtcacccagctggagtgcagtggcgtgatcttggctgactgcagcctccgactccctggttcaagtgattctcctgcctcaacctcctgagtagctgggattacaggtgtgtgccatcatgcccagctaatttttgtatttttagtagagatggaatttcaccgtgttggccagaatggttttgatctcctgacctcgtgatccagcctgcctcggcctcccaaagtgctgggattataggtgtgagccaccgttcccagcccaaatgagataatcttactctgaccccaggtgtgttcagaccagaagagctacggctggatctcacccagatgtctctgatgactgtggggctcacatcagtgaatgaggcagggtgggctggtcacagctatcttgcttagagggagcagaactctctaggtgaccacagttttatacccaccctgattgtctcaacaatgaagtcgctgtggcttttatggaagagcaatttctaggttgtctttcattttatgttgatatcatggtttttagagtacttggcagtgggggagacggtgatgacaggcaaagatgtgtcgtacaagaggaggaaacagccctgtggcttcagccagctgttgccatggtggaatgtgggcaagactggccaagctttctgactgtccaagaaaagccagtaatctgaaattcttttgtgtgaaatctcccaatttctaaatgttgctgaatcattcaaagatttaaaagacattaagaagaacatgacaatgaggaaaaaatgacaaacatcagcaaaccccagttcccagactgccaattcataacccagttcacagaccaccaactcacaggggaatctgagcctttgtagaaaccagtgagggttgaacaaagccctttaataaatagtaaaaaggaaaatctcatctttcctttggaattttaaccaaacaacactatttaacaatgtgttctctatcttcaacctataggaagaaaccctttccttaacctacacaaaaagtaaataaatctacggcaaggatttttttttttttttttttttacaacatcaatgaatggtttaaatgtgatttttttagtttatgtctttcccagttgctatcatgggttaaaagagattgcagaatattgcacaaaaggaaagaaatatgaagttgcttcaaaagatgaaaaaacagtaatgggcagatttaaaaaaaaattgtcaagaaaatatccaaacaaacttaaatgtcaccagagagtttgccaataagtccataaagcaaaaagattattaacctcaagacagagctactgttgggatcacaggaaaaccatcagctgtgcaccatttttattgacacttcagggtaaactaataaaactccccatttcaattaaattttggaaactcatgttccctttttcttaaatgctgtaaaccagcttataaccacacagccccttttttctaaaatctcctcttggctgaggacgtggagccaatggcacattctagcatttttcttactatggctttcctggacacaggcggctataagacgtgatgttaatgaaagggggaattgtaactatatggttttcatttttgcaggtgagcttgttgagccattttgaaatcaagtgctcctttagggtgtgcttagtgttccttttcaggggttcctggaatcatgtccgagctgaaacagatcttggggaattttattacagattttacagactggagaattgaggcccagaatgtctaaccctgccagagccaaagagcaagaaggagtcaacttcaattccatgtctttggtaggcatccttctaaattgactcccacttacccctgcctcctggtattcatggctctgtgtagtcttcttcctttgaacgtgggctggacctagtgacatgcttctgatgaatggaacacagcagaagtgatggatgtcacttctgtgtaagtcacaaaagactgtggctgccatcatgcttgccttcgctttttctgacacacatactctctctctctctctggctcttctcacatgcttgctctaataaagccagctggagaggcccatgggacaaggaactgagggaggccatccaccattgcaatgaaggaacagaggccctcagcccagtcaccctggagggactgaattccaacaacaactatgagtgagcccagaattggagccttcagatgagaccacaaccctggctaacaccttgattgcagctttgtgagagatcctaagccagaggcccccagctaagtgatacatggatttctgacccacagaaactgtaagttactctatttccatagtttggggaaatttgatacacagcaatagatagctaccacgatgtccagggctcttgactctaaggccggcattctttgtttcattggctgcctttatattctttgtagatatctgcatcctattagtgatcactggcagaacaatgtactagttaatgtccaggatataaagataagagtggcagagtccttagtatcactgcattttgctttaggactagaactatattttatttttatttatatatatatatatatatatatatatatatttatttaagttctagggtacacatgcacaacgtgcaggtttgttacatatgtatacatgtgccatgttggtgtgctgcacccattaactcgtcatttacattaggtatatctcctaatgctatccctcccctctccccccaccccacaacaggccccggtgtgtgatgttccccttcctgtgtccaagtgttctcattgttcagttcccacctatgagtgagaacatgcggtgtttggtttcttgtccttgtgatagtttgctgagaatgatggcttccagcttcatccatgtccctacaaaggacatgaactcatcattttttatggctgcatagtattccatggtgtatatgtgccatattttctttatccagtgtatcattgatgggcatttgggttggttccaagtctttgatattgtgaacagtgttgcaataaacatacatgtgaatgtgtctttatagtataatgatttataatcctttgggtatacacccagtaatgggattcctgggtcaaatggtatttctagttctagatccctgaggaatcaccacactgtcttccacaatggttgaactagtttacagtcccaccaacagtgtaaaagtgttcctatttctccccatcctctccagcacctgttgtttcctgactttttaatgattgccattctaactggtgtgagatgatatctcattgtggtttggatttgcatttctctgatggccagtgatgatgagcattttctcaggtgtctgttggctgcataaatgccttctcttgagaagtgtctgttcatatcctttgcccacttgttgatggggttgtttgtttttttcttgtaaatttgtttgagttctttgtagattctggatattagccctttgtcagatgagtagattgcaaaaattttctccattctgtaggttgcctgttcactctgatggtagcttcttttgctgtgcagaagctctttagtttaattagatcccatttgtcaattttggcttttgttgcccttgcttttggtgttttagacatgaagtccttgcccatgcctatgtcctgaatggtattgcctaggttttcttctagggtttttatggctttaggtctaacatttaagtctttaatccatcttgaattaatttttgtataaggtgtaaggaagggatccagtttcagctttgtacatatggctagaactaaattttaaactggccatcttaatgggatacaacagggcttccaaataagactagtttccttattgggaaaatgaatatgacaatgcctgtatcattgttctattgtaagaaataagaaatgcttacacacacacaatgctctctgtgtgctgagctctacacaaagcactttattaatattaactcatttaattctcataattttatgatgaagacagtagcatcacccttcattttacagacagggaaattgaggcatatagattttttaaaagattacactggtgaaaggggcagaaaaaagattcacacctgaggcgatcgttgagttctagagtctgtgttttaacaattttactttcttgcttttagaacaatgaagaacaatggaacaacatatataatatcttagcacagtactcaatacatattaagtgctcaatatgtggctgctattattattattaaagatacacttccattgtggcattggctggcaatggcagatcctgcatataacaaagattttatgaggttttgatgaaagctgacctgaagcactcaaattctttaggatatctgtcaagtgaaaatgccagcatttaaaaatgcttggatctaaagatatcaggatactttctattgaatgtgatctaaagcaaacaaacagctagccaaaaatttctcctctgtcttgcttaggctaagaagcaaatgtattgtcacgcataactgaacattcagaggcaggattggcttcaggcaggctggattcaggctcatacaatgtcatctggatttattcctcctgccatctgctatgctagcttcatcctaagactacattcaatagtgcccagcatctccaatccacgcccttctgtcatcatggagagatgattcagtagctccatctttatatgtttccaagtttgggccacatgaaagaatgaaaaccttgtagagcttaaaaaattaaagattcattctgattggactggcttagtcacatgcccatttctgattcatatcagagagatatggtggtttgagaccaggtcatgtgctcttctctcggaggtgtaagtggagtcacatcctgacccatgaactagagcagaatgggctactatccgagaaagtgggaactgatgtcaggggctcactgcaaaatgttgaagccttaacatatctacatgtttgatgtctagttctttatagagagtaaatatatgagtcttccatcattttgattcttgcttttgtcttgtgtactcttttgatcattatttttcatagtctgctttcttatataactcaacatttacaataaggtatcctagcaagcactttttaaaaacatatataactgcaaaaaaagaatggaccacttttctgggactgtgcctattgaagaaatgtgggctttattattatctcttagttttttgtgtaaccttttaaagtgctttatagctctctctcctcctatatttatctttcatttgaaacaagtgaaaaacgggatcaattcttggcatcagaaggaaatgaatacctagcaaaactgcatcactttggaaaccagtgcaatgaataactacccttaagctttcaacaacacaatttatagttgaattctttatacggctgacatgtcttggacgtcacacaagggattcagttacatcttgtattagttatctatggctgtgtaacaaatcaccccaaaatttagcagctagaaacaacacacatttattgtctcacaatttccgtaggtgaagaatctgggagcagctcagctggatagctctggctcagagtctctcacaagactgtactcaaggtgtcagacggggcagagtcatctcaaggctcagctgcgggaaggtctgcttcgcagctcacatatgtggccattgtcagatctcagaagctctgcttccaagcttactcacatggggctctccactggtctgtttcacgacgtggcacgtggcttcccctagagcaagcaatgcatgagagagtgaaagagagcacccaacagggaagcacaagttttctgtaacttcattttgaaaatgacatcccatcacttctgccatgttctcttcctagaagcaagctgataagtccagcccacagtcacgcggaggggattacccaaaggaaggaataccaggagactagaaggcaggacattgaggaccaccttgagagcctgcccactacacctctatactcagaggactgtgttacaggacagtttaatctctaggcaaacacagaaccaataagactataaagcaaatagttttacaagatcccagtgtggtctgtataggcatttatttttcaaaatttgattgattttttttctctttagctgacaacattgattttatttgagggagaaaaaaacccaccaacttaattattgatttcatttgaaaagactttttaacatttggagacttctggatatactttgagagtaaaaaaaagaaacagaactgaagattcacctactaaagaaatggctcttggccgggtgtggtggctcacgcctgtaatcccagcactttgggaggctgaggtgggtggatcacctgaggttgggagttcgagaccagtctgaccaacatggagaaaccccatctctactaaaaatataaaattagccaaatgtgttagctggcgcctgtaatcccagctactcaggaggctgaggcaggagaatcacttgaacccgggagatggaggttgcagtgagctgagatcacgccattgcactccagcttggacaacaagagcgaaactctggctaaaagaagaaatggctcttaattttacaaggtctgctttacagctttgtacgtataaagcatattgacacattgaaaggaaacaattgggaaatagtgaattaagaaaggctgtgtggctaaagaaaagatcacgtttaatttgatagaaaatggacttatagagatgaaaaatgctgtagaaatggaccgagacaaggcaacccaaccatttttcacttttacatgtgagtatggttttgattctattcaaactctggcttttctagaaaaaaaaaaaagagtaactggctagaaagttattcatttccctttatgcttgggaatgaaataaaatgtgttcctctttttgaagttgtgcgtgctttcctttccgtcgaggttacttatgaggcacatggaaataagggaatcaatttcttcctcttcttgtgctacaaacctttataaaggttgctataaatgtcataactgccttgtttcctgaaaagtaatttccctgtcattccgatctgttcctttgagataccatattattggtctatgatgatttctttaaagtgcgtcaaagtatgtggtttagtgtatttttcttatttcactgccttacagtgaatttctcactcacttcaaggcttgctcctaagtcaccaattattcataaaggattgcttgattttatcctcctaatgaaatgaattaaggttgaagaaaagcccttaacagagcataaaatgccaaaaagaccttaggaaattataagtccttccagctaaaatgtgaatttaactacaagaagaggaagaagcaggagaaagaacatgcttagaaatggtggcatgatgagtcctatagaggtggacagaggggaaaggaagagtcatagttcagcatttatggcttccgtattgtcaatatccatcagatgcattaaaaacaatcctagaaacgaacagaaaggccaggaatgcaacagcaatcacagtgatggtcctaaagcatctaaacctcctctgaccgcacagtgtctctgataccatgaagagtagaaggacagatgagcatgagggtaaatatacatatggaaaatgtttgtttttacttgtacaccaagaaatcactggctcaagctcacaaaatgcaatcatattttattacattttccagttattcaagactcaactataccagaaaacatcttaaaaaacacttttaaacaggatgtgaatgctttgtattacacagcttaatgtaattgatttagagtccatgaggaaaaccaattttccttttttttttgtgagacatattgatttaagggaaaaagcagtaattgattgtatctttggagatcaaaggtgagttgatgagagaggaaactggaaaggagagagaaaaagacatagatagaaagagataaaatgaggtctgaatataaacatctatttctgagatttaacttattatcactaagttttcattttccccaaatatttctcttcaaggaacagaaatcattcggattcagatctgtgtgcatgcaaagaatctgtatgtgtgctctttggctgagcccatttgtaaaataaacaagaaacatagagctgttaagaaataagatgagccaggacttacaggcacagatgtaccctcatcttttggatatttatactgagttttcttaagcactcaaaactttggaaggattttaagatgcttcatagagtcatttgtctaattggatatctaggagagcaatatctaggaagaatgcactcatttcagaaaacgaaaagttatttgtaattataatagcgggcttttctgcctctttttggaactggtagtgagcatgctggctcagttcctcaccctatgcctccttttcttgcttttaaatcttctccattatctcctttattatctgctatttattttactgaaggtaatcactgctttattaatcactgcttgagtaaccacagtgggacttgaaatgagcttgtttggattgtaaaagtcacaaatgctggtggacctcttgaaatttccctttttcccttcacttttatgagaacttccacgtgtagaaatgtcatgggcgaccagaggtggtttagtgtttctgaagcttggagaaagggaatttgaagatacttttcaggtagcatacacgtggtgtgtcacggtaaaccataagaaattctcattgcttacatgaaagagacttggtttgcttcaagagcaaaacaataaaaatggtttttgaaacaaaagtaatttaggcatccagtttgtttttcggaaataaaaactcaaatgtgaattcattttgaagctggtaattacattttgtttctaatgtagttgtaagaaagacttataaaaactggatttcaaatagcttttgcaaaataacctttgcgtttagttaaataatcagggccaggcgtggtggctcacgcctgtaatcccagcactttgggagactgaggcgggtggatcacctgaggtcaggagttcgagactagatggagaaaccccatctctactaaaaatacaaaattagccgggcgtggtggtgcatgcctgtaatcccagctactcagaaggctgaggcaggagaattgcttgaacctgggaggcagaggttgcagtgagcaagatcacgccattgcactccagcctgggcaacaagagcgaaactccgtctcaaaaaaaaaaaaaaaaaaatcagaagggaatttcaattttccttgaaatactactagatcttagaaagtaggggcgttatcaccgcaaaaacatgccaaattgtaaggaccatcgatgctaagaagagactgcatcaactaacgagcaaaataaccagctaacatcataatgacaggatcaagttcacacataacaatattaatcttaactgtaaatgtgctaaatgctccaattaaaagacacagactggcaaattggataaagagtcaagacccatcagtgtgctgtattcaggaaacccatctcatgtgcagagacacacataggctcaaaataaagggatggaggaagatctaccaagcaaatggaaaacaaaaaaaggcaggggttgcagtactagtctctgataaaacagacgttaaaccaacaaagatcaaaagagacaaagaaggccattggataatggtaaagggatcaattcaacaagaagaactaactatcttaaatatatatgcacccaatatgggagcacccagattcataaagcaagtccttagagaactacaaagcgacttagactcccacacaataataatgggagactttaacaccccactgtcaacattagacagatcaacgagacagaaagttaacaaggatatccaggaattgaactcagctctgcaccaagcagacctaatagacatctacagaactctccaccccaaatcaacagaatacacattcttctcagcaccacactgcacttactccaaaattgaccacatagttggaagtaaagcactcctcagcaaatgtgaaagaacagaaattataacaaactatctctgagaccacagtgcaatcaaactagaactcaggattaagaaactcactcaaaactgctccactacatggaaactgaacaacctgctcctgagtgactactgggtaaataacaaaatgaaggcagaaataaagatgttctttgaaaccaacgagaacaaagacacaacataccagaatctctgggacacatttaaagcagtgtgtagaaggaaatttatagcactaaatgcccacaagagaaagcaggaaagatctaaaattgacaccctaacatcacaattaaaagaactagagaagcaagagcaaacacattgaaaagctagcggaaggcaacatataactaagatcagagcagaactgaaggaaatagaggcacaaaaagcccttcaaaaaatcaatgaatccaggaggtggttttttgaaaagatcaacaaaattgatagaccgctagcaagactaataaagaggaaaagagagaagaatcaaatagatgcaataaaagatggtaagggggatatcaccaccgatcccacagaaatacaaactaccatcagagaatactacaaacacctcttcgcaaataagctagagaatctagaagaaatggataaatgcctcgacacatacactctcccaagactaaaccaggaagaagttgaatctctgaatagaccaataacaggctctgaaattgaggcaataattaatagcttaccaaccaaaaaaaaagtccaggaccagatggattcacagctgaattctaccagaagtacaaggaggaactggtaccattccttctgaaactattccaatcaatagaaaagagggaatcctccctaactcattttataaggccagcatcatcctgatactaaagcctggcagagacacaacaaaaaaagagaattttagaccaatatccctgatgaacatcgatgcaaaaatcctcaataaaatactggcaaaccgaatccagcagcacatcaaaaagcttatccaccatgatcaagtgggcttcatccctgggatgcaaggctggttcaacatatgcaaatcaataaatgtcatccagcatatgaacagaagcaacgacaaaaaacacatgattatctcaatagatgcagaaaagacctttgacaaaattcaacaacccttcatgctaaaaactctcaataaattaggtattgatgggacatatctcaaaataataagagctatttatgacaaacccacagccaatgtcatactgaatgggcgaaaactggaagtattccctttgaaaactgacacaagacagggatgccttctctcgccactcctattcaacatagtgttggaagttctggccagggcaatcaggcataagaaagaaataaagggtattcaattaggaaaagaggaagtcaaattgtccctgtttgcagagacatgattgtatgtctagaaaaccccattgtctcagcccaaaatctccttaagctgataagcaacttcagcaaagcctcaggatacagaatcaatgtgcaaaaatcacaagcattcttatacaccaataacagacaaacagagagccaaatcatgagtgaactcccattcacaattgcttcaaagagaataaaatacctaggaatccaacttacaagggatgtgaaggacctcttcaaggagaactacaaaccactgctcaccgaaataaaagaggatacaaacaaatggaaggatattccatgctcatggataggaagaatcaatatcctgaaagtggccatatgcccaaagtaatttatagattcaatgccatccccatcaagctaccaatgactttcttcacagaattggaaaaaactaaagttcatatggaaccaaaaaagagcctgcattgccaagtcaaaagaacaaagctggaggcatcatgctacccgacttcaaactatactacaaggctacagtaaccaaaacagcatggtactggtaccaaaacagagatataggccaatggaacagaacagagccctcagaaataataccacacatcgacaactatctgatctttgacaaaccagacaaaaacaagatattgggaaaggattccctatttaacaaatggtgctgggaaaactggctagccatatgtagaaagctgaaactggatcccttccttattccttatacaaaaattaattcaagatggattaaagacttaaatgttagacctaaaaccataaaaaccctagaagaaaacctaggcaataccattcaggacataggcatgggtaaggacttcatgtccaaaacaccaaaagcaagggcaacaaaaaccaaaattgacaaatgggatctaattaaactaaagcgcttctgcacagcacaagaaactaccatcagagtgaacaggcaacctacagaatgggagggaatttttgcaatctactcatctgacaaagggctaacatacagaatctacaaagaacacaaacaaatttacaagaaaacaacaaccccatcaaaaagcgggcaaagggtatgaacagacattctcaaaagaagacatttatgcagccaacagacacctgaaaaaatgctcatcatcactggccatcagagaaatgcaaatccaaaccacaatgagataccatctcacaccagttagaatggcaatcattgaaaagtcaggaaacaacaggtgctggagaggatggggagaaataggaacgcgtttacactgttggtgggactgtaaaccattgtggaagacagtgtggtgattcctcagggatctagaactagaaataccatttgacccagccatcccattactgggtatatgcccaaacgattataaatcatgctgctataaagacacatgcactcgtatgtttattgcggcaccattcacaatagcaaggacctggaaccaacccaaatgtccaacaatgatagactggattaagaaaatgtggcacatatacaccatggaatactatgcagccataaaaaatgatgagttcatgtcctttgtagggacatggatgaagctggaaaccatcattctcagcaaactatcgcaaggacaaaaaaccaaacatctcatgttctcactcataggtgggaattgaacaatgagaacacatggatacaggaagggggacatcacacaccggggcctgttgtggggtggggggagaggggagggatagcattaggagatatacctaatgtaaatgacaagttaatgggtgcagcacaccaacatggcacatgtatacatacgtaacaacctgcatgttgtgcacatgtaccctaaaacttaaagtataataataaaaagaaaaagaaagtaggggcattatgaatctacacaggtgataatatttcatagacacacacacacacagaacatcatgtaaaaactggtgaaatctgaataaagccaatatttgagttaatactataataccagtgtcaatttcctggtttgacactgtactccatttatgtaaaatacgtcattatatggggaagctgactgaagggtacacacacggtaactctctgattttctgcaacttcttgagaattcaaatttgagaaaaatgaagatcaggaacgtaagaagaaactgaagttatttagagctatgtcttgatgcttcttttctcatttctttcatacacacttcgcctaggagctttaaataccatatagatgctgacacacccaatttatatctcctgggtgtatctctcttctgagttccaaggtcatacctaattgcctgtttgacatcttctcttagtactatcacaggcatctcaaaagttttaaatccaagagtgagtttttaaaaaatttcagtagttttggggagtacaagtgatttttggttacatggataagttttagtggtgtttctaagattttaatgtactcgtcactgtacccaatatgttgcctgttatccctcacccccacaactctcccccacaacaggtccccaaagtccattatatcattcttatgcctttgtgtcctcatagcttagctaccacttatgagaaaatacaatgtttgattttccattgctgagttacttcacttagaataatgacctccagcatcatccaagttgcattcctttttatggctgagtagtattccatggtgtatatataccacatcttctttacccactcattggttgatgggcatttaggttggttccatatttttgcaattgcaaattgtgctgcaataaacgtgaatgtgcatatgtctttttaatatcatgacttatttttctttgggtaggtacccagtagtgggattactggatctaatggtagttctacttttagtttttcaaggattcctgtgagtgagtttttgagcaagttccctaaccccagatttcagctgcacgttgtacttattcaggttaagcctggaaatgatcccatctctaaccagcctctgctcccaacatccagtctaccaccaaacccaggcaattttaccctcaaagaaccgttggaaactcctaatgtatttttcttacagttttcattatggaaaatagtaagcatttacagaataaagataataccataatgaatccctgtgtagctatcacccagcctccaaaatattatattcaactcatgtccagttttattttctctcctctccatttcctccacttcagtgtattttgaagcctatctcaagtatcatattatttctgctgtaaatatttcaacatacttttctaaaaaatacaatattccttacttgaaaattataatttcttaatattatcaaatatctagtcatagtgcacatttgtatgattagcttatgatttttacagtatgttttttcaaatcaaacagtttcatacatagcaattggtggatatgtttcttatcctttttaatcatctcatttttttcttatttgtttattgaataaactaggtcatctatctgttagaatttccagccctctgcatctttatgatttcatctgtgtggctgacgtagagatgtaccacccagatcccacttcaggaaggtcttgttgcacagttgctgggaatgtgagcagcagacagattccctcttccagctttcagttccttcattatcttacttagtcatacggagcttctttgttttcttttttcttctttttttgagacggagtatcactctgttgcccaggctggagtgcagtggtgtgatctcagctcactgcaagctctgccttcccaggttcaagcgattctcctgcctcagcctcctgagtagctgggattacaggtggcaccaccatgcccagctaatttttgtatttttagtagagacagggtttcacagtgttggccgggctggtctcaaaatcctgacctcaggtgatccacccacctcggcctcccaaagtgctgggattacagacttgagccaccactcctggccagagcttctttgttttctagcatatcaaggtaattcaggatagtcttgtacatttctgccttaatcctagaattatctattttcttttaaggatttctaactccttataataggaaattatctttagggatcataatctggacacaaggagtgttctttattttctacgctgaaaacagtgatcagagccgggaaatttaaaaataggactacaagattatcacttaaacttatggaggctgagatgtgttaagttctgctgtctgcaagttggagacccaggaaagccagtggtatggtttgaaggcctgagagccagtgaactgatggtatagactctagtctgggtctgaaggcctcagaaccaagagtgctgaaggcaggagaagatcaatgttccagctcaagcaggcaggcagagagcaaattcaagcttcctccaccttttgttctattcagagcctgaatggattggatcatgcccacccatgttagagggggcatctgccttacttagtccaccatctaaatgctaatctcttctggaaacaccctcacagagatcacaagaaataatgtttaaccagctatctgggtaacctgtggcctagtcaagttgacacataaaattaagcatcacagtatggtctttaaatcagcaatggcttcacctgggagcttgttagaaactcagattttcagacccaccttcagacctattgaatcagaatttgaatttcaataagtttgagaagcactgctttaatttaacccattttattctttctcacacacgtgtagaatttttcatccgtattcattctttgacaccttttctccttctgtcatgatagcaaacattgattgtgccaacagatcaatgtgcaattgtgccaatttgcacagacactgcgtagagtgcttttgaaattatttaatactcaaagaccctttaaagaagatctgattattatctccatttttcaggagaaggaacagaggcttaggatagtcaagtaacctgcccaagttacacagcagtggtaaatccaggactgaaaaatagctggtccgattcatacattgtgtttaactactttgccatattaactccctgggatctttctaatccttcaatatttccataaaattctgtcttcttcagcccctttgctgaactcttgcagttattccattgcttctcagaagttgataaattatcctgtcttcattaatgagtcaattgttctttctctaataccccacacttgatcattaaggaatgctatgtctgaccttcaaaatattcctcgagtgtgagcactgctcattgtttagtccactgccacccagttaaagcaccattgtctcttgcctggaacataacatactcctctaattgcctcccgttcttgcttgtctacagtgtgtcaagaacagccatggtggtctcctgttcaaaatctttcaatggcttctaactgcgcttctagtgaaatccaaactaattaccaaggcttataaggctctgtattacaggtcagaaaacaatggactaagggcccaatatggcctgccactgatttgaaaaataaagctttactgtaacccagccatatccatttgtttacatatgatttgtggctggcttttcctttactatggtggcattgagtagttgtgactgagactgtggggcccacaaagcctaaaatatttcctatctaaccctttacagagaaaatttattaatccacattttagatggtctggccctgcctacctttcggacttcatctcctagctctctcccttgtgtgccctctgccctggccacaaagcctccttgctcttccttgaacatgccaagcttgcttctgccacaggatttcaacacaaaatatttactttgcctagaatgtttttatctctaagatccacatatctccctccctagcttcatccaagttctgctcaaatgtcacttcagcatggccttccctgaccaccctccctaacatccccccacccctattccatcaccttccactccttgccctgctttattcttcacggcttttatcaccatcctgcatccatctgtttgtctgtttgttaatttattgtctctcttcttccactaaaacctaagctccatggaatcaaggatcttaattgtttggttctctcttgtatctctagcagtcttagaccacataggtgcttagtttatttgttaaacaaactaacttcctaactagctattatgtgtggcaggtgctgtgctagatactaggtatacagaggtgaactcttgtttatggctctccagggcccacatgggacctggacgtggttctggaaagtgatcatcttgagcttcgtgtggcaattcctcaaagacctagaaccagaaataccatttggcctagcaatcccattactgtgtacatacccaaaggaatataaatcattctgttataaagctacatgcacacgtatgttcattgcagcactattcacaatagcaaagactcggaatcaactcaaatgctcatcaatgatagactggataaagaaaatgtggtacatatacaccatggaatactatgcagccatgaaaaggaacaagatcatgtcctttttggggacttggatggagctggaagccattatcctcagcaaactaatgcaggaacagaaaccaaacactgcatgttcttataagtgggagctgaacaatgagaacacatggacacagggaggggaacaacacacactggggcctgttgggttcggggcgtgagcagggggagggtaagcatcaggataaatagctaatgcatgcggggcttaatacctaagtgatgggttcataggtgcagcaaagcaccatggcacacgtttacctgtgtaacaaacctgcacatcctgcacatgtatcccggaacttaagaaaaaaagagatactgcaaaagtcatcaggagccagcacacctgccaggtgaaaccaggtgttctaaggcagggcatctatatttttggatttcagagaattaggtttttttctctgcattttcttcttactactggagaatgacataaggctgccaacttaattattttgtcatattggatatttcaagtaataaatctgctgtctgcaaaaagacaccttcaagataggtgaaaacatttaaatatgaactggatattagataatgcaatggaattattaatacttagtgtgacaatggaaatatgattatatctgaaaatgtcagttttgcttagagatgtatattggagtacacagggatgaaatggcatgaagcgtgggattggctttcaaataactgggcacagcaatgaagtgtggaaggtagtagtgttaccccattttacagaaaaggagagggaatctttttttttttttttttttaattttatttttatttttttatttttttattttttattttttttttttattgatcattcttgggtgtttctcgcagagggggatttggcagggtcataggacaatagtggagggaaggtcagcagataaacaagtgaacaaaggtctctggttttcctaggcagaggaccctgcggccttccgcagtgtttgtgtccctgggtacttgagattagggagtggtgatgactcttaacgagcatgctgccttcaagcatctgtttaacaaagcacatcttgcaccgcccttaatccatttaaccctgagtggacacagcacatgtttcagagagcacagggttggggataaggtcacagatcaacaggatcccaaggcagaagaatttttcttagtacagaacaaaatgaaaagtctcccatgtctacttctatccacacagacccggcaaccatctgatttctcaattttttccccacccttcccgcctttctattccacaaaaccgccattgtcatcatggcccatccccaatgagccgctgggcacacctcccagacggggtcgtggccgggcagaggggctcctcacttcccagtaggggcggccgggcagaagcgcccctcacctcccggatggggcggctggccgggcggggggctgaccccccgaccatcctcccggacggggcggctggccaggcagaggggctcctcacttcccagtaggggcggccgggcagaggcgcccctcacctcccggacggggcggccagccgggcggggggctgacccccccacctccctcccggacagggcggctggccgggcagaggggctcctcacttcccagtaggggcggccgggcagaggcgcccctcacctcccggacggggcggctggccaggcggggggctgatccccccacctccctcccggacggggcggctggtcgggcggggggctgaccccccccacctccctcccggacagggcggctagccgggcggggggctgacccccccacctccctcccggatggggcggctggccaggcggggggctgaccccccacctcgagagggaatcttttgatgaacttgccactcatcaagattacacaactagtaagaggtggagctaagagttgaactcagacaatatgaacctaaaaaccagtgttactaaatgagtcactccaatgaagaactttaactggaaatttggtgtcctacggagaggccgtagcatgcaaagatgccagctgtcctcattgatacttctacctacccttccatctgtgctcctgcctccattcccaccctcagataaggaaactcaggacctctagacatgtcaagaacatacttgagttgagagacagctctccatatagacagctctccatatagacaccaaagtttgtagccagatttttttttttcatttttttaatctttcatctccatggtgttcaatgaacccggaacataaacagacagatggtctgagtgggcgggcattttcacttaatgctaacacagttgccatcaatcccacctcttaaactaataccacctccctcttaaattaatgacgtcacaggtatgcagctccctgcagaccttggcaatcacatgggaatctttttggcacttctgagagataagatctatggaaaaaagtctcagaatctgcaaatcttttccagagaaaccttatcctgttaagaactcttggactgatagtctcttgataactgacagtgaaataacactaataataacaactaaaatgtaccgtgcatttattagtatcaggtaccatgctgagtacaaggattttcactccattctcatcaccactctgcttagtgagtaccttgtggctgttttggaggtgggaaaacttataaccagctaacgtttttacttatgaattctcttacctcaaatatttacgaagcatcttccatacttaaggcacattatgtacaacttattacagactttcaaggagcttttagccttaaaaatgggagaaattaacagcaacaataacacttacggagtttttaccatgtgtcagatgctgcgcctttcgatctttggttgtttaatgatttcaacagtctctgatatggattctcttttctgccccatattttagaaacagggaaactggagcatagataggttaagtgacatgcctcaagtcacacatgtactaaacggttagagctcagatttgaaccccagaagcctgtctgttgacctgcatgcctagccaccatgccatactggtcttccttatttaaaatgtacacatccccccacccatccccccaccaacacacactaaaaataaccagtaatgtgaaatcagcttagaataaattctattcacttttttttttttttttttttttgagatggagtctccctctgtcacccaggctggagtgcagtggcgcgatctcggctcactgcaagctccgcctcccgggttcacgccattctcctgcctcagcctcccgagtagctgggactacaggcgcccgccaccgcaccaggctaattttttgtatttttagtagagacggggtttcaccgtgttagccaggatggtctcgatctcctgacctcgtgatccgcccaccttggcctccctatttacttttttctacattcaatgagagcgtcaacatctctaggcaagaagtctcattcatatttctgtccccaggaccccagaccagtgactcagtgggtagtggtgttgattttgtaccccagggaacatttggtaatgtctgcagacctttctagttgccacaacgtggggcggggtgtgctactggcttctagtgggtaataacaaggatgctgctacccctgcagaacacacaagagagtccctgacatcagagaattccccagccccaaatcggtgatgccaaggctgagaccctgcctgagtataatgactaacaaagttaagtgttcaatatatagttttttgggtaaatttcaagtcgtataccaacaacctccaccaaacgacaatccctaaaagataacgtttgcttatctttcaaaacccagctcaagcagcaccacctcctagaagcctttctgacaccatcagacagcattttttttttctttttaaaaatcctagtaaaatattggcttattttactttctcttcacccttttcctagtcagctctgctcagggaatgcaaatgtcagcctaaggatgacactattaggccaaaagtatgtttcttcaaaagcaatgtgaaacatttcaaagttaaaaaaaaaaaaaaaaaaggaaaaacctgtgaattttccatggctttgtagctgggatttaaatcctaagtttccagtcacaagcaattatccagcttttaatgaaatgcaagccttctatctagttgctaaatctcctgagatggtttctggtttcttcagttctcagtagaaattcttttttttttttatagacaggtttattgaggtacaatttacatacagtaaaattcactcttgttaagtggatagttctatttgttttgacaaatgtacagtggtgtaaacatcacaaaaacaaactaagcacacacaaagtgttaatagtaaatgttttacattttaccacatttatttatttgtttgtttgtttatttatttgagacggagtcttgctgtatcacccaggctggagtgcgatggtgcaatctcggcccactgcaacctccacctcccaggttcaagtgattctcctgcctcagcctcccgagtagctgggattacaggttcataccaccaggcccggctaatttttgtttttttagtagagacgatgtttcaccatgttggccagcctggtctcaaactcctgacctcaagcgatctgtttgccccggcctctcaaagtgctgagattacaggcgtgagccactgtgcctggcctaatttttatttttatttttttttttcaagaagcctgtcttgcttttgtaagtattttctatctggtctatcaagacataatttacatataataaaatttaccctttgcagttctgagagttttgataagtgtatacaatcatataatcactaccaccttcatgatgaagaacatttctatcacctctaaacattttctcatacccaggtgcagttaagccccttccctcttcacacgaggggaagaggcaagggccctgagaacacctgagagcacctgacgggtgggtttctgagctggtacttttgctttttccagaatgttatagaaatggaatcatataacggtgtgtggtatttcatgcctaacttcttttgcttcacgtaatgcctctgagtttcatctatgttgttggaggtatccatagtttgttctttttattgctttttattccattgtatggatgtagcacagcttctttaattcatgagtcgataggtatttggtttgcttccagtttttggagatgatggagattatgaataaatctgctctaagtatttgcatacatggtttcattgggacataaatttttgtttttcctggataataggagtgagattgttgggtctatggtaagtacatctttaacttttataagaagctaccaaactgttttccaaagtgcttgtgctgtttcaccatcccattagcaatggatgacagtcccagccacttcacctctctgccaccacttaaaattgtcagtggtggccagacatagtgactcatgctggtaatctcagcactttgggaggctgagacgggaggatcacttgagtccaggagttcaagaccagcctggacagtacagtgagaccttgtctgtacaaaaaaaaaaaaaaaaaattagccgggcatggtggtgcatgcctatagtctcagctactcaggaggctgaggtgagaggatcatttgagcctgggaggaggacactgccatgagccaagactgtaccactgcactccagcctgagcaacagagcaagaccttatctcaaaaaaaaaaaaaaaattgccattttcatttccctgatgactaatgatgtcaagcatttttaatgtgcttatttgccatccatatatcttcagtggttatgcgcttattgaaatcttttgctcacgttttaatttggctgttttctgtgagttttgagagttctcgatatattttagatacaagcccattattagatttgtaatttgcaaatattttctcctagctgtggcttgtcttttcattctcttaacattctttcaaagagcagaagcctataattttgatgaagtccaagttatcaattttttcttttataatttgtactttttgtgttttacataagaaataattgtctagtaccaggtcataaagattttttttctcctaagttcccttttagcagttttgtttttttttagattttacatttagagctatgattcatgttgagttttgtgcatagtttgaggtataagtcaaggtctcttatttttgtatatgatgaccgactgttccaacagaatttgttaaaaagacaattgtaagttgcagggcccgctcaaaccgagtaaccattgcttaagttgttttggatagcacagggccaaaattgcaagtcatatagcccagacatgccaatgaaaaacagctttaacctcttagtatcaccagccaggcaggctggctgcattggcagcacctgggactagttaggaacgtcatagagcttgacccacctccagatcagggagacaaatttcagcgttgcctctacctccttgccagtcaacttgcagtgaagctttttcttgtctcaaaagctggtgccataataggggcttctctgcacgccaggtatgaattgactgctcaataacataatcattattcattaaattacctttgcaccattatcaaaagttaactgacaatatgtatgcagatttatttttattctgtattctgtttatggcagctttgtatctactttcttgagcaaacacatgtaccaaacacagttaacagcactttacaaataataactcatttagtactcattacaaccctcatggcatctgcttctaatggttctattttcttggcaaggaacctgaggcacggagaggctaagtagatttcctagggtcacacagcctgtaattgatggcacttagcttctattttcttctctcattgtaaatcatcctttagtataattgtggatttggttgtctgaatttttcactagttggtaagctgtttgagggtagagattgcgtctttaagctttgtggcctaagcacttagctaatgccagccttggagaacatgctccatgaaggtgtataaatgaacgaatgaatgaatgggcaaatgcacaaagtatggacgaaatgagtgctctgaaggttgtgctctttggaacctctgccactggcatcatttcccaagtgaaaaaaaaaatggctgccaacaacgcagacaaaaagctaagtgaaaatgaatacaggatctgtctctaataaaaacagaaaaagaattatgcttagaaatattcatcactggtgcacgatgatccagatttcaacagatcaaccttgatatgctgataagagactatttgtggaaagactgaaccttggaggccacactgcagggctccaccggagatatgacaattgccaacatctgtatgggaattaagggatggagacatgaggttaattgccagggctttaagaggcaggagaggaggaggtggaagaattataagaatcatggtgctgttagtgggaacagccaaggctctggagttggcaaagaagattaagctgcgggtgacaggcaggtggagggaaacccagcacatcccactggctcaaggtgacctttctttcttttcttttccttttatgattaaaggacaatcatgcttgtggttacaactgtcaacagaaaaggagggtagaaattaaaaagtctccaaacttccttggttcccctgagagagttcataagattgactttgattccagacatttttctggatacatacagtgatctatcataaatatctaactagcaggcaaatttttgtgtttccctcacctcagggagtcctcttacttccaagtctttccaaagtttctcatattccagaaaacatattttctaattttatttttattttttgcacaacgaacagctctttgttgcttactttagctgcagattagaatcatctgaagatttttgttttatttataaatgatgactgcagaagcctcagtcccagagaatctgatagctttgtttttgggtatggcctagatattggcgtgttccccacatgattctactatgcagccagatggaagtacaactgattctcaagtcaagttgcaccagaattactttatttcccttaactatggttattagccaagcccctgattagagagtctgattcagtccttttggaatggggtcagggcagtggtatttttttttctctgttccccaggtgcagctatggttgactcactgctgcctgaagcttttgcaatccatgctaatgggagatgtgttggaggggaaccttatgcaatgtgtagaaaaggaggcaaagacgttgaacccagacctggtcattctcagcaggagttcacaattgcaatttgtggatgctgtaagcatctctgtgatggtcaggagtatctacctgcaagataaaggaaaaagaattttactaatgttacatgattggctacttgatgcaggatcttacctggaggaacatcattcatttaaataaaaatgaaaacaatctgctgtgaatcactgtgttcaatcagtgcttctcaaacatgaatgtgcacaggaatcatcaggggatcttgtaacgatgcaggttttgatttggtggatctgggttggggcctgagatgctgcctttctaataagctcctggggaattgtctcgggatgacaatttgagtggcagggtatcagttcactcaaaatgtggttctgatgtgagaagcttgaatatagttattttatgcagtaagagagtgaatcatatttcaaattgactttattctctatgtatgattttaaatggatgtatagctaacataagaaatgaacatagtgaaccattcaattgtacagtttatatataccatttggcccaaatgcttttttacttacttttaaaatcttttcattaagaataaagttttgctttgagggtgggatggttggtaattttgtattctggcacatatacaatcctttagggattagcgttcataaacatagatagttctctgaaagcattgaacaggtggtagaatgaagtaggaagccggtgactgagaaaaatctaggctggttagcagatgccttcgcttggaaaatagggataatattcatacctacctcataaagttgctgtagaaataaaatggggggatacatatgcaaagcatatagcatagtgtctgctccataaaagggactccataagctatgccagttttatcactatgttaccagtccttcaggaggttatgggatgcttagaagtgtatttggaccctttcaaaacaaaatagatgagtacatgtttttcttcattaacacctacgcatttataattttatgtaaattcatgcatactaacatgtcatgcatgcctttctttagtttagtctttttattttactttgttgcttgggtcctccatcctcacatatcagcggcccgcctatgttaacctgggttcatatctagtatgtacttttaacatttattattattttattattttttctagtgtatatttttaaaacaaaaaaccctacacaaatatgcaaagtataaaatttgccaagtttttacatgtatatacacctatgaatgaatcaccaaaatcaagaaaatggaattatttttcactccccaaagtttcctcatgcacctttgtaacgcctccctatcatcccttctcaccctcttacaggtcccaggaaacactgatctgctttctgtcaccaaagagcattttgcattttccaggattttataaaattttataaaatgactcatagtatgtaatgatttttgccaggcttatttcatttagcataattatgttgaaagctattcatgtcatgatcatggatttagatagacctttcttctttacatatataggcatttaatactataaattttcctctaaatattggtttagcaaaatcccacaaatgcattttgttgtgttttcattttcattcagttcaaaatattactttccattttgattttttttcctttggtgttattaaattttcaaatatttgtgaattttccagaaatcattttgatttctaatttaattccattatgatcagaaaagaatgttttgtatgaatgaaacccttttaaatttgttgagccttgttttgtagctcagaatatgtctaccatggtaagttttcaatgtgtactctgttgttgttggatgcagtgttttaaaaaaaacatcagttagatcaagttggttgattgtcttcaaatcttctgtattctcactgattttctatatacttgttctagcaatcattgagaaggatattgatatctttgactaattgtagatttcaattttctgataatttttatcagttattacttcatgtattttgaagctctgatattgggtatacaaatatttagaattgttatgtcctttagatgaactggcccttttatcataatgaaatgatcttctttattcttagtagtattctttactctgatttagctatttcaactttcttttcacttgtgttagcatggtatgtttttttctatcctttttaatgtatttgtgtcattatgtttaaagtacatttcttgtagggggcatatatttgagtgttgacttttaaatctaatgtaacaatctgctttttaattggactatttagactgattgcatttaatgtgattattgatgtgattaagttaaatctattatcttgctatttgctttccattgtaccatctattccttgttcccttttgctttttccctgccttcttttggattaattgtatattttatatactttcacttgtcttctttattgtttcattgaccatgatattttttgttattttagtggtcattttagagtttacaattcacatttttcacttatcacagtgtactttcaggtgatgaagtatactttacatgtagtgtgagatctttacaatagtctacttctatttctccccacctgacttttatgatattgttatcatgcatgtaatgtatacatatattataaaaactagagatatatacacaaacacacacatatagtgtgtagagctatatatgcttataaataatgtttataaaatataatgaaatatataaatataaaatattgcattatttttgtttaaattataaatattttatgcttagtaatttttattttattgcatgccagatattgtgcaatatctctttttgggtagtgaatatttttgttttcaacaaaaattctcaagctttgttctaggacacagttatttatactagttaccctttatctgcagttttgccttttatggtttcagttatctacagtacagtacagtgatctctttgtatctgtgggggattggatccaggacccccaaaagataacaaaacccatggatgctcaagtctcccatataacttggcctagtatttgcatataacttatgtacatcttcctttataccttatctctagattacttataatacatagtataatgtaaatgcaatgtaaaggttgttatatgatattgtttttccatttgtattttttattgttgcttttcatttttttaaatttattttttgcatattttaaatttgcagttcactgaatctgtgtatatggaacctgtagctacagaggtctgactgtacaagaaattttgagagaaggggagagagagtgtattcacataacttttattacagtgtattgttctattttattattagttattgttgttaagctcttactgtacctaatttataaattaaattttatcactggcatatatttatagaaaaaaattctatatagagttttataccatccccagtttcaggcatccactgggggtcttagaacatattctttgcaggtgggagaattcctgtcctggaaagcagtaggattcctgcagatttcgcttttcagatctgttagcctggagaagttatccgttttgggctcattctttcccatttctgagacaagaccctctgtgcactctatcgcacgccccatgaatcatgaggtttcccatttttttctggtggcaatagagactattccccagccccgcatgagtgctgagaacagtaatctttaatgttcttagatgattttctctttggcctcaggtagtttcctaacatgtgtgaactgatttttttttttaataaatgaatatttgagggaaaccctcagcaggtcttccaagttctttttctgtgcatctttctcttctgagaaagctactgtgtcctctgagctttagccaccttggtctccccaagtatccttaactcagggagtctgcctggctcccgtaggcgcctcaggtaccagggcctggccagtctctcaaggcagttagctagaactatagtgtgcctcaccttgcttgttttccatctctcaggaccattgtcttttgttgtcttatatccattatcttgaaaagtattgtttcatatattatgtcctacattattatttttttggttgttttgggcaggaatgtaaatttagttcctggtactctatcttgattggaagtagaattacagttccttcatgctcatgtctacatcctcgtataactacatacattcatgtatacacacatgcacacatatataaatgaacatttaattatctcattctactaaaatggaattgtatacacatattgcatcttaattttcttacccatagatgccttgaaccctgtcctccacatcaatgggtataattataattcaatcactttaatgtccatataatattttgtaatatggatgtgacataattttaaaaaaccatctacttatggacacttcctttgtttctaatatttgacacttttaacaatgtagtaatgcctctctccttctctctctctctctctatatatatatatttaaaccatagcatcttaattcaacctaaaccagaaataagattggtaaacaactattttgacatgaagatactgtttttatttttttaaacaaaattttttagatcataattgtagtgatcatgatgatgataagcatgtatagaacctatgtccaagtgctttgcatgtattaactaatctaatgctaaccaacacctttgaaattctataaggtattatcactattttacaaaaaagaaactgagtcagtaaaaggttaaaccaactgcccaaagtcagacagccagtaagtaggggaggtgggttttgaagccaatctagctgcagactttgaagcatagtagcattttcatgttgttgtctgaactgtaagttgtttgattttacttaataatataccttggacatgttttcatattagcacttacagattatctcattctatcttttagctgtatttgaatataccagaatttatttccctagtcttttattgttggacattaaattgtttacagtgttctgcttttatacacaattttgcaatcaacatccctgaatatatatatgttagtttatccttgggaatttgtgtatctgatgaataaatttctagcaatagtttattcatcaaagagtatgtgcctgtatatttttagcaggtgctcaccgccttctcactcacacagatgaaatctattaagtttataaatgtaaactttcaataacagtgtgactatgggacagtgatatttaagggatattttaaagggtggtgtagacatgattcacatgttatttcacaatgacatgtcattgttttccttcttcttttcagcttcttctctttcatatttcagtatgaaatagaaaatccaacaaccctgtttccattgaaaattgccaaataaatcatcagatctttctttttagaggcgttgccttcactatctggatgtaataattataacaactgggaacctgattcgggctgttggcttctcccgacatgttcagtcataatggggaaactaagaacattttctatttccttccagcatacagcagtattaagaatcctaggaaactgacaacttcccacttctatagcatctgaaatacaacccaaaagaaactgagctcagatgtggcctcagggttggacatttgaaatggcaatgcatgggtcttggctcacagctctcagaatcccagctttgtatgtgtttcccttggacaatgtatgtgcttagtagatgaggaggaaaccgcatgcttctctccagctcggcggagaaaaatatttcttctctttttccttctaatgatttcattagtcatattgtttacattttactgaaaaaaattatatcccccctttaaaatacttgagcattgggcagttcatgtaaataataaatctgcctaagtttacaaattcttgactagaaataataaacctgggcgataatagtaaccatagaattgaacagcttttcccagaggggcactcagtggggaaatttggtaattatagttagcaaatggccctttggcaacagaatgtcttttttaaaagctcaacaaaaataattctggggaaaataaaaaggcataatctgtgaaatgctgaatgtaaactataccgcatgacctaattaagaggactgctatggaggatttttccaaaatactcaataaaatgagccttattatggcagtttgggggaaagtaagcctatttgtttcggaggtgcaaatgccagataatataatattaaaagaagatagattcaaaagcaaaagagattactgtgaagagcagataaatgaagtgtaagcacatttagtgttaaagacaatttttttttcactgctacaatatctggtactgcagacacatggaaatttaaaggtttttcccccacagtggaaacgttatgcttagattgcatgttgctcatctaatatccttgatatgagctttaataatattgaaagacttgctattcagctgcctaacagttctaaagtggatatctggcctagccaccagattgaagaatgtgaaagagcttattcagccacgttaatgaacaaagtcaatgactactccgttacttcctgtcagttcactcatccctccatccctcctcctgtctacgttttcattaaaatgttgattgaatattccctacgtctctggcactgctcaaagtgctggagctacagcagggaacaaaataaacaaggttctgttcatatggaacttacattttagtggatgttgggttggagaaatatgacaaataaagataaataagaacataatttatcaggtaagagtagatgataattaggaagataaagcctgtgaaagaaataaagcatgatggaggggtgtgtgtgtatgtgtgcgcgcgcatgcatgtgtgctactttaacaggagcaagaacaaagttaaggaataaagaaaaaaccttaaggctatcttggaggaagatcactggagatggtgcacaggccctgaggtgggaatggcttgggatatccaagagtaacaaggaggccagctggactgatgcatagttttcaaggagtagagccataggaattatgagcagagacatgtctacaagcatgattatgtacttggggccttacaggcaatggttgggcagccaatagagagttttgagtattttagtggcttgatctgatttatgttttaaaatacatttggccatccatatctgtgcattccacacccatggattctgccaagagaggactgaaaaatattccaggaaaaaaattccacaagttccaaaaagtgaaacttgaacttgtcacaagggtaaagtattgtgcaggtcttgtgttaggtattataagtaatttaaaggatatgggaggatgtgtgtaggttatatgcaaatgctatgccattttatataagggacttgagcatcttgggattttggtatatgccaggatgtggggattggaaccaatctctcatcaataatgaggaacaactatactccctctggcacttattggagtgacggtgatattctataccttgattgccatggtagttacacaactgtgtgtgtttgtcaaaacttatagaaatgtacacctggaagggtaaattttactggagataaattatagctcaataagcctgaattttaaaacgttctttatatctgctgtgtagatgatacaggggccagaatgaataaagacagactaattaggaggctatagcaaaaaatcaggcgaaatacaatgatagttttaactaggttggtagcagagattttggtgagaaatatcacggtttagggtaattttaaaaaatacaaccactgaaacttagtgataagtataaattcttctcttacttcccactcgtccaaatctcagcaaatgctgccaccacaaaccagttaactcaagccgtaatccaacgaacatctttgattaatgcatcagtcaattctgtaggctcttcttccaaaacatggcttgaattcttccatttttatttatgctaaccataccttgatagcatctctatctttggaagatgggatagcaaatcccatcatttcttgctaaaacaattgcagtatcttagtatcttgtctttgaatttattctcctaatccattgaaatatattctcagtatggaagttcaaagtaatcattttgaaacttttatgtaacaaatctttattgagtacctactatttgcttgggtaatttagaacctggagggaataaaacagaccaaaatctattgaacatgagcctgtttaagtgggtttatgaattaaaatgccaggttaacccttataaaatgagcaagtggcttagatatattcctgcaaacaggccgggcgtggtggctcacccctgtaatcccagcactttgggaggtcaagacgggtgaatcacttgaggtcaggagtttgagaccagcctggccaacatggtgaaaccctgcctctaccaaaaatacaaaaattagccaggcatggtcgtgtgcacctgtagtccagctacatgggaggctgagccaggagaatcacttgaacccaggaggcggaggttgtagtgagccgagattgcaccactgcactacagcctgggtgacagaatgagaccctgtttaaaaaaaaaaaaattcctccaaacaaactatggattgaagaaaacaccaatgaaagcacagaagtatttcatcaaaaattatccataactggtcagagagaccaaaagttaagtttcattaagtgtgatcagtaatgccctttttatgtttggaactgtttcacacattacagacattaaaacaggaagtgaaataaataactcagactgagaccttggaatagctttatcataaaatatgaaaccacaagcttcaaaaaaaatgaaagcatatttattcgaactttgcttttaccaaaaatgatttatcttccatctcatctttttataatttatttgtgagtattttataaaatatagaatgttagtataataaaacatacaatttataaattaaaaaacagccttgaattggggatggacatttgaaattttcttattaatggaatgtacaatcaaaaatgtttgtagactacaaatttaaatacttggtattacacaaatgtaatatcacttttcaaagtgtttattttttaaaaataaaacatctttttttaatccctttgaatttttacatttagaaaccatccattgcctctaccagagagctgggacgatgtggtttgcatgttgagatcaagaatccaggagaaccagccaaggtgtctgcagaatctaccagctctaaattgttggaaatgctggtggaattgaaatccccttagtgagatgcagcaactttcatctgagacatatgctgtaattagcagtttcttaattaccgagtgcttgaagtatgtcatactgggaaggggtggcgggaaaatgctgctgcgcttgaagacacaaggtgaccacgttctctcaaccagcttgagaccccaggttcactcttactgcagcacaaacacactgtggccaagagaagaccattcaaaggtaccccactgcttcctatttagagggggaaaaaggacgtcatatatccctgctcatgatggcataatttggtgttaaagtcagttgtgatggcaaagtaaagttttggtttgtttggtgagaaaactgagttcaccctcttgccaccctcttatctgtttgagccagaaacgatcccatctaccaagtgctgtctgagagccagggtccatgcccaacaattttcatgcatcgatacctttcatctcatgaagcgggcactactctgatatgcctttgctaggtaaggaagctgaaattcaaggagattttgttccttgttagtgacaacatcaaggcaaagtggctctagagcctgcctgcttagtcacaactgtgccttgtcactctactgctttgaaccaggcagctattgtgccggtggcatatatacaaggaggctgagggacagagcaaatattcaggacaagagtgagtcatgctgagggattgtggcaagaagaaggctggctgtgggtaggggagggccttgggcctggggagaacagaaattctattgaatttctaactaagtgctgggcagagtagctcttcttccttacctccttatgaaatcatcagtcaaatacactcatttcttgttaaagcattgcgagttgcatccctttgcagagatgtgtttaactcttgagccacgcttccaattgggcttggggcagaaaaggaaagtccccagatgctgtcctgttatacctgcttggcttgttttagaacaagagtctttcaagtcctgggactaatttattggcttcggttacaggggagctgcagcttaggctgcctggcttttgtaggaccacaaagaggaatctctgagatgctttgtttcttctagaataagatccagtactaaaggggaaacgtgcttctgtaacttggtcaaggtttacaaagagaaacaccctgtccctctctgcatgaatttccattggccttctatggaatttatggcttttgtaggaagggcaaaatctggcagtgggaggaaattcattagtggtatcactcttatggttaggattccatgaccttgaggcacataaatctggaaaatggcctcagtgggcatccagtgccctgataaatagacacaacactgtgagccaagatttgtagtctatggaatctccttttctatatgaggagatgtgcatcctgcatctcaggcacttatattatccagagctgcagaaacaaggttatcagtttattggttcacttacacaccttccttgcttcctttcagcttcctcacccagccttgcaatctcagctactaatgtcatccaagctaattttcagagccgggttggcagagttggcatgtaatggatggacattttgatcttggccagcacgtttctaagtaggaagtagtgtccatccattaggggtgtcaagagtttcatctctcaaaaacagccctttttgtggtaatggatagctgctctgacagcttcagaggactgaattaggatgtgtgttctgcagatatcaggaaaagaaacaggaataaaacacaattatactcaaacctataacttttgcccgccttgaatacatttagttgctcacccccaaggctggaggatacctaataaagagacattttctggttaactgacaatgttttccttttttttcttttttcttgtcttttccagcagaagtctcttgtttctgccaagaactctgaaaagttaaaaatatttatcctgcttgcaagctaacaacttagcctgctgtagtttcttagatgcaggcagaaaacatgcaactcctgggtcagagacaaaaggcttgtattactcaaggcacagcaggcagcatgatcattgtgtttgctgcaggtgccctctctccaagttccctgggagtgatgggaagcagcctgggtagatgctgcagcctcaggaggtttggagcacagctgagtttaagaaatcccaaacttgtaaagagggcagtctaacctttgcctagagagagacattatcttatagtggtcaggaaacaaacctgccctctgccccaagggagctactatctctatcttccaaggcctttcactatacaaacatccgaaaaatcgtctgaaacaaaagctactacagaatgtgcagaaatgtaggaaactcatagagaagtacctcctggtaattgcaggaaagaatttggcaaaactggttcactgatactacattacttacattttaaatatgaaatactggcagttattttcaactaaaggcaaatataaaaacactgtcattggctcaaataatagcaaacaaagagtagcatgggattttgcctaaagagtacaatctggaataatatattgtcattatatttaacatcccttcaattaaaataccaattaaaatatgatttatttcaagtaaatgtcctacttatttttaattacactatgctttgttagtcactgtatttatgttggaaacaagatcattaaagaattatttgtcttatacattgttaaataaggcaaagccccaactcacaattttctctaatttgagaagaagtgggagaaaagaaaacaatgggatattttatcgtctggaaagtggaggttcatctaagatatggctatttgcattgctcccatttttgtgaactgctgcttcatttttacaaaagaaaaagaaacattttatgaagagattaacaaaaggcaccacttcactctcttaccacttaagattcatctccatgccttttcctgtattggatattgtaattatgtgattctttcaagctgatcagcatagcatgcaagaagtgccagttctctcaaatatctctagaactatattcataaccatgattcttttcttgttttttaaattctttttttaatggctataaattaatctcagtaataattgttatttgagggttccatcgcatgtattgacgtagtcacatttccaaaatcttttaatacaaatttccgaaatgtacataacttactaaatcctgggcttattttaccaccatgctgtctcctttttcaaggataaatgcatagttccatgtgctcctttgaagcactgaccaaggagttttcttcctgtcctgaaatcatcaacaaatattcttccagcagtttttctccccttgatattttatttctctctgtggagattttaaagaaaagagggataaaaaaatctttggaagggtatgttgagattttctcttcaattatatttaagttgggatgtttgatgccaatacgacagctaaaatggcaactgacagtaatatttgttagggctaaatctactctgaatcaccataatatataaaactacaggacctcaagaagagcaaaccaccaagatgctgggcaaaaatccccaacacttgtgatagtttgctgagcatgatggtttccagtttcatccatgtccctacaaaggacatgaactcatcattttttatggctgcatagtattccatggtgtatatgtgccacattttcttaatccagtctatcattgttggacatttgggttggttccaagtctttgctgctgtgaatagtgctgcaacacatggacacaggaaggggaacatcacacactggggactgttgtggggtcaggggagggggagggatagcattaggagatatacctaatgctaaatgacgagttaatgggtgcagcccaccaacatggcacatgtatgcatatgtaacaaacctgcacgttgtgcacatgtaccgtaaaacttaaagtataataataataaaattaaaaaaaaagtccccaacactgggcttctggtctccctaacatttatcattcaagttaacaacttggaggctccccttctcatgccctcagttttgcttccacatattttttattcattgagcaatgtaattgagaattccaagctatgatgagcgaatcaccaaccatataaactcaagattgaattactaaaatgatcatcaccatcattaggctcctattgcatagaaaaatgataggcacatacttttaactatttttcaatagttctaattattttcttgagatagttctttttataaaaaagaaaagatggagattgtggattcagttgcttcaggactttaaaaaacctattaccttgtttttctaaaaaaaggtgtcactttttgcttttttcatcccacagtgattgtgcagagaactctaaaatgccactagcaagggtagtaggaattagacaagctgctcccccatggtaattgtcaaatcatcttacttatactaaagtaatgatatgtccatgtctactcatccagtctcgctgcctaggtggacaaccatccaggaagaaatagacccagaacataacaaccctctctcacaacttggaggcctggtgagtgatggcagctgatacagccatgcatcagcctagcacatcttgccacataagctggatgtgaaaacaacagcatcagaaaagacagtccagctcttgtgagtcattttcctgattgatctaatttaccttgaaggttaatgtattctaaactaattcagagattaataaccacttaaagatatatgaaagacatttcgctctctgtgagcagtgtgtcataacctcatttattgcctcttcaatgactttgggaattatttgatgagatttaaagggaaatttgattgtaggatatggagagtgacaggtgcaatacatacagggctttggaaattattcttgttaataataaaaacaagcatgtaatttgattttccataatgtgatcttcaaaagcaaatatttattttcaagctggaaatcatttttatctattgaatgagataattgaatatgctattttgctaaaaaggaaagattgcttttaacataaaaagtgacacacatgtttttattacactccatatatttaatcacaatgaacggccaattgctgagggagccttatgtgtggatatcttaaatagaggttcataaagaatgtttctgctacttgttttcaatcaactgaaatgtattcattagtagaatgtggttaaactcatttgagcatgcttaaagatggggtatccaacccaacaaatgggaaaatcatcccaacaaacctctttctcttccccttctagtgttttcctctcaaatttttatttactttattttttttgatctacttttctatttaactctacctccaatttccaagttcaaagtgatcactgataggtagtaaatgtgattgcactagcaggaaaagaagtgttatgatttataggtattggagtgatatggagtaaaaatgtggtatttctctcacctccgctttgagctatgatcatagttatttgaagagaacagttgaatttaggcttttgaacaaataatcacgatcatgatttttaccctcacctctacctcactatataggaggaatttactaagcaccttctctgccttatcttccttgttatgtatatcactcccatgagaaaggtgaccttattattcccaatatgcagaatggggagctgattttcttcctatttacctgcaattttgcctgaagtccaagaagtgctatgtaccctcatttttttcccctcaattcaaacaagtgagttgttcgagaatcattgatcgtatgggtatctctataagaagaagtctactgtatgtcctgggaggatactgcttaggctgtaaaacttttgattttgtgcctctacttatctaaagagggtagtgaagagattggaaaaaaactcatgggctgagactgggggtggcctgcaattccagtgcatgatgcaacaaagatgtgggagtttctcacatgtccttaagaagtaaggaagccagctgtgcacttttccactgatatcttcctgtgagggctgccgactagaaaaagaatctgtgggaagtggtaggtggcataagtgttgtgaaaagaccccacagacctttgcaaagcacccagacctgagagccattcaaatgctgccacacagagggcgttgacagccagtgaagagtagtaagagaagcagccaccacagagcggagcatggagactgtctatccagcaaggagacatttccctcttaatccttgtcctacatcccaacaacccaacaacccaacaacagaaacgttccagccaaggaggtgcataagaagctattcatgcccttctcaccactgcaagcacctttgcccacatgtctggcaagcactagggtaggtgaactaggtaggtgagacggcagtgagctatgattgtatcattgcaatcattgtacgacctgggtgatgaagcgagacaccatctttggaaaaaaaatttttttgaatttatgaaaaactattacgggatttggaaagagggtttcaaccactcagaagaaaatagtttatttatacccctcaaggagttgactccactataaatataaaatactatataaatttaaagattatttacctctcaactaaaatgtttattgggtataaaaaagtgccaggttgcatactgtctctttgatacaatatacaaaagaacatgtattcaatatattcaaattatgaaacatagcaataaaatgaacaactttgacctcaccacccaacttaagaaatatgctaattttattttttttgagacggagtctcgttctgttgcccaggcgggagtgcagtggctctatctcggctcactgcaagctccgcctcccagcttcacgccattttcctgcctcagcctcccgagtagctgggactacaggtgcccgccaccacgcccagctaattttttttgtatttttagtagagacggggtttcaccgtgttagccaggatggtctcgatcccctgacctcgtgatcctcctgtctcggcctcccaaagtgctgggattacaggtgtgagccaccgcgcccggctgaaatatggtatttttaaaaaaaaatttattttaagttctggggtacatgtgcaggatgtgcaggtttgttgcataggtaaacatgtgccatggtggtttgctgcacccatcaacccatcacctaggtattgagcccagcatgcattagctatttttcctaatgctctcccttcccccaccccaccccctgacaggccccagtgtgtgttattcacccacccatgtccatgtgttctcactgtttggctcccacttacaagtgagaacgtggtgtttggttttctgttcctgccttagtttgctgaggataatggcttctgcctccatctatgtccctgcaaaggacatgatctcattcctttttatggctgcatagtgttccatggtgtatatggaccacatttcctttacccagttgattgctgatgagcatttaggttgatttcatgtctttgctattgtgaatagtgctgtaatgaacatacgcatgcacgtatctttataatagaatgatttatatttctttgggtatatacccactaatgggattgctgggtcaaatggtatttctgattctagatctttgaggagcgaataggcaacctacagaatgggagaaaatttttgcaatctatccatctgacaaaggtctaatatccagaatctacaaggaaattaaacaaatttagaagaaaaatgaagcccattaaaaagtaggcaaaggacacgaacagatacttctcaaaagaagacattcatgcagccaacaaacatatgaagaaaagctcaatattactggtcattagagcaatgcaaatcaaaaccacaatgagataccatctcatgccagtgagaatggtgactactaaaaagtcaagaaacaactgatgctggtgaggttgtggagaaacaggaacactttttcattgttggtgggaatgtaagttagttcaacactgtttaatatgtattcttaatgatacaattattaagtttctgtgtgcctctctttgacctcactttctttgcctaattaatttataattatttcccattatctggagtactgtgcatgtcccctaccatctagctcattggctagcacagtgcaggtacacaaacgtttgatgaatatccttatgagggatgcagataacaatgatgaagaccatgacaataattgcctttatggagcatattccatgggccaggctctgtctttttctctgtttataatcaacacaaatattctgcaaggtattttataatattgctatgttacagctgaagacaccaaagcaatcacaagcatagtcgtttgctaaagccacacacagtcactaaatggccagaccagaattgaagccaactctttcaagtgacagagctttttctcttttcgttgtgctaacttaactcagtctcttacttctcagtgtctgttacaggatcaggcctggagtttgttatataattgatacctggagatgcctcggtggtctatggattggcacaattgtggcattgccttcccatgaattcaaggctattgctgtctttgaactgatataaactgtatttttaattggtaactagtaaaaaaggatttgaaggaaaagttccttcaggaagttaaacctggttatttatctgccacttttgttgtataaccatggaatgtacaatggcagttatgctaagtaagtgatttatctccacaagttattgattttctcatgagtcaagaagggtggaactgagcggagctatgagtgatttatggagaggtatcaataaaggataccaataagaaggtgtctccatagtcaggcccattttatgtttcctttttgccacattgaacccaaataaatgtcctaaatctatcacctgatgtgggtaccatgccccagccaactgtttagaagcgtaggtttaatcatcaacaagaaaaatttatcttgataagatcctttaaattgtacttgtcaccagaaaagtgttctttaaaaatgctacaaggtttcatatctcttctttcacaatgaattatgagctcaatttcttttaagcttgaacctttttaattggaaattcttgttgcaggatttttaacattggcagggtattctaatatcttgcttcatctccttgaatctttgttggttatctgtgtgtgtgtgtgtgtgtgtgtgtgtgtgtacctatatatgattatgttgattgtgtatgtatctatctgtctataactaaacaaataagagtgttaactgtgagaattttgtttttgtaacaataattagtttgctaaatggcttagttggggcgaatgacttaaggaaaaagaagtcccatcccatggaaactagatgcagttcatttatttgagggagatattttagtatgggttgggagtcccagccctgacatttattagtcatgtaacctcagacaaaacttgtcagccctgtctgttttcctaactataaaatgcaaagatggttcctcctagagagcttctacatcacattgactagcgccaatacaaggcttagtacagtgtttagccgatagtgactactcagtcatcaaggcacatagtgactacacaccaacaagacttgctgctcttgttttgtgtccctaggccacaccccgatgtagaagtcagcattctcgaaaaccttagttcaccaggtaagcccagctttacatcatgaattaactagtaaaaaggatattatgaaagagaccacaaaaattctcctgtggaacaaatgtctctggacaagagctagtaaataacaggcctaccaaccacatgactgagtttggagcagtttttctggtcccatttgagccttgaagtaattgcagttccctatgacagcttgaccacaacttggtgagagaccctgagctagaactacccagttaggctgctcttgaattcctaaccctcagaaacgatcaggagtaatatgtgcttgttttaagctgctgagttttggggtaatttgttttgtgacaagataccttattgtccattacaaactgcaccctatctttgctcttgacattcccagcccttttatactgcttgcttttttgggggcggggcaggtctggctctgttgtacaggctggagtgcagtggcacaatctcagctcactgcaacttccacttcccgggctcaagacatcctcccaccttagcctcccaagtagttgggactacaggtgtgcccccactacactcggccaatttttttgtattgttttgtagagatggggtttcaccatgttgcccaggctggtcttgaactcctgggctaaagtgatccacctgccttggcctctcaaagtgctgggattacatgtatgagccaccgagcccagccgcttactttcttaatatcctcctccctcccttccttccttccttttccccctttctttctctctctctttcttgttctgtagcagttggcactttctaactttttaaattcacttattatatttattgtctacatcctcctaaaatacacgttttataaaagtaaaggttttggcccatgatgttaactgttgtatcttcagtacctgtcaaatagggatttgataattgtttgttgaatgaacaaatgaataaacataagctcagataaatgaaactgtcttggtttaattgtcgtttagaggaaatttttatatttagtatatttgactgtttttgtcccagctcaggtctactctagacttggggcctttaaaaagattaagttcggagagctaagagataagattcctgcagtttgagggtctttttttttttttttttaaacctcattaaaaccttgattcttttttctatgcagttataaaccttagtaaatttgcctgctgggaaaagacagatgaaacaaatggccttctacttaaatggcttttacctgaatttaatttcatctatgtatagcctcagtataaagttgctttagaattctcttgataagaagcaatgcagaaaaaatgtgatcatcatagtggggggtgtcgggggggtagaactcagatagctttggccttcctttttttttttttcttgtttgggtccaagttttcatcttctctgcatttccaaacagatgctgaattctcgtttgtccctaatggacacatcaagtgtactctagtcgctgtgtctgctttgctgtgagtagtttgcaattcctatgattaaatatgcaattaagatttaaatacaataaagcacatgaaattttgcaattaggatgaggctgcactgctcatgacagatttaaatgtcagcgcctccagttggaattgaaagtgagattttgctctctccatttgaatttggaaaaccctccattacacattactaaccagaatcagttgagactgggagttggtatactgaaagtggttcctttcaggcttataatgcattgatcctaaataatttttggagagatgtgtaggctgccagtgtacaaatgatgcagtgcaagtgatattattttagtttgataatcaacgtgtcatagcttctctccccgcttggtacgttgcattgtaaatccgatactcacaggcaaagtccctgtgatccactatactgccttgagttgcggcaacgttattatgaaaaatacattcatttgtctatatggaagggatttaaaggttgctgcattcattttttaccgcagtctaagtacttaatcttatggacattgctcaacaagaaaatgatctcttcctctctacccccattagcaacattctttcagtctcaagaaatataaatattggggcatattaatgaaaatgacatctactgctgatatattaaaactcaaatgtgtgattaagtattctgttaattaactctttttgtcagaataattgtaaatgcgttctcatacttcagagcaatttgaactgccaggagaaggttagtagactgccctgagatagttggaaatcagacatcattagtttaattaaattccattaacataacaaaaacagtttcttcgattttttttttaaaggatcctaatagagagaccgtcatagttacagcagcagccaggagatactaaagttgctgttttttaacccacaacttctatcgcttcttcagagtatttgccggctctatcatcacccattgatgcaacagatatttattaagcctttgcaaggttttaggcattgctgtaagttctagggatagaacagtatcttagtccattcaggctattacaacaaaacagcatacattgggtggcttataagcaacagaaatgtatttctcatcattctggaggctgagacatctacatcaaggtgctaagcaaatctggtttctggtgaggacccatttccttgttcacagatggtgtcttccatgtgtcctctcatggtggaaggagaaaaagctcaggcctttgaaaaataaggatactaattccattcctaagggatctaccctcatgacctaatcatctcccaatgacctcactcctaatatcatcacattgggagttaacattttacaacatgaatttggcaggggcggcggggggtaatgacataaatatttagaccatagcaagcagtgagtagaatattcaaggtcactcctcacagagtgctattggtgttgggggccagactataaaataaacagacaaatatggatggtgatcaatgttatgaaggaagctgggtgcggtggctcacgcctgtaatcccagcactttgggaggctgatgcaggcagatcacctgaggtcgggagttcaagactagcccggccaatgtggtgaaaccctgtctctactaaaaatacaaaaactagccaggcatggtggcgcaagcctgtaattccagctacttgggaggctgaggtaggagaatcacttgaacccaggtgactgtaagctgagatcgcaccactgcaatgcagcctgggtgacggagcaagtctctgcctcaaaaaaaaaaaaaagttatgaaggaaaaaaattaggcgatgcgatcaagaagttatgggaggtatatggctaaacctgcaattgagtgatcaatactgactctgagaggtgacatttgtacgggatcccaatgacagagctgaatagagagattggcaggtgaaggattagctggggaaaaggccctgagttggggacaggattaaggtttaaggaagagaaagattaggccgaagactgaagtccattgaacaggggcaggtattggaagatgagggtggccagggagcaggagtcaggccatgtagactatggtgaagagtttatttttagggcaatgggaagctattatgaaggagagggatataatttgatctatattatttaaattgactttggtgctactgtttggggaatggatgtagaagaccaaaaggcaaagtgggaaaaccatttaggaagctaatgcattatcacaataataaatgatgcaggcaccaaatttggaaatggctgtctgcaagctgagcataatcatcacaccagatgtacctcatgatggcttgagacctccccacaactcgacccctattcccttttccagctttatttcccactacttcttactactgtagtcagtgtagtccacctgtccactgtatgcacttctatctcacacctgtgttcaggctattgggcctgcctgaaatatctcatctacgcattatctaggtcggggtcattcccacacttcagattggaatttggtactgctatctctataaagtcctgaaggaacaggttaacttctgaacctcaggtttgaatctggatcaatcaaactgcaaaccccttcaacaaaagccctgggatttttgttaaaattgtagatttctacagcttactcaatatttgccaacttaggtgtctgggtggggattaggaatctgtaaattaagtatcctgggtgatgtaggtatccacttaggctcgaaaacaactgatgtcatgtttcctgtccgttgtttttcagtattaattgcatctgtgattaaagtatttgcgtgggagaagtacattctttgtgtttagactgatctggatttgtatctctgctttgtacgttgcaggtagcagttgtatgctgtcagacaagctagtgtctctgagtagggattatgataccattccccagtattgttaagatgaaatgagatggtgtgtctgaagtaacttgcataatgcctggcactgaatttttgtccttgtaacaacaacgacaacaacaacaaaattagcatttattatgcaagtgctgggaatattctaggcattttttgtttgtttgtgtttttgagatggactttcgctcttgtctcccaggctggagtgcaatggcatgatctcagctcactgcaacctccgcctcccaggttcaagtgattctcctgcctcggcctcccgagtagctgggattacaggtacctgccaccatgcccggctatttttgtatttttagtagagacgatgtttcaccatgttggccaggctggtcttgaattcctgacctcaggtgatccacctgcctcggcctcccaaagtgtggggattacaagcgtgagccaccgcacctggcctaggcaacattttacttgctttttatgaagaaactcatttagttttcacatgaggtcaactctattgctatctcctttttatacttaaggaaacagaggcatacagaaggcaaataactagcccaaaagcacaaagccagtcaacaactgcaagtaaccacagtagctgtaaataactgtaagtaattgtaagtaacaataaataacaacccatgttcttggcttgtcatgctaccccacctcccactatggcagcaaagcagctggggcaggggcttcacaactgggagctttcaattacttgctatggcatttcatcaagatgggtgtgttatgataccatgtaactctagctataactcatgaatcattgtcttcctctccctccttatcatacccttgaggttctatcttccgatgttttcatcttccaaagaacttacatggaatctttataccaaaaggggtcaacaaatatttgttgaacaaaacgatatgaatgtacctaagacagagcacagtcccagagatggaaagactcccaataaatatgtcttgaataagtgagtgaaattcatcctctttacctctgtttactctggattttccttggagttatttcatctctgaccttggtatcctcatctatacaatcaatgagctggggcttgcattgaacccaccacctcttcctttaccgtcaacacatacacatacacactcacacaacacacatacacacagtaacgtgatctattctgtctccaaattttccacttactaaactcaagcatgtaaataccagcacccagcacgtgttttggagagtagcaggttgtatgacagttgatttttttaggaagacaccaagatagctttaattctctctctcacactgaatatatcttccaagaagaattcatttatgctgctgtgaagttctgaagtcctgcctaaaatatatcgcctctagcagatggcggctgctgcctctctataaagagaaatggaatgccgctgacgtacagatgtatttaatgggaaataataggcctgagatttccaacagcttgcatgtctcctttggttataaatgacagaaagctatcacaaataagcttgggcaaaaagaagcatttattacaaggattctgagatatcccacacaatctcaggagagggatgtggctaggcctcagggataactggattcagaaaatcatacaccataaccattattgtcttcttttttcctgctcctctctgtaaatctggcccattcacttgtgtcttctgttggtctcccctttgttggcatccctgggccttttctgtgtggtctctgggagctctccccaaatttacagcttcttttctgaaatgtgtgtccagcttctctttctcagtctagttctcagtttcccaaagaaggtgccttattgttccagtctgaatcaggagcccaccctggaccaatgggccagaaggtgggctgtggtgacactgctgttcctcgtacaatcatacagatggtttcaagaaaaaatagcttcagaaagaggcgagagcagcttgcagaaggaagccagggctgaagtataaccctggacaaatacaacagttatgtgtttactgaaatctaccaagatctcatttctattgccataagggtctgaagtcatagctaaaatgattgcttctggcagataagtgctgttgtcttatccataaagagaaataaaatgctgctgagctatagagcattcagtatgaaaggttaggactgaggtttcagatggctaggatgccaagaatccttcttcagccttcagagagtccttgtttcatgcaatacagagccatcttgaacagaaatttccaggatataacaaaaatacagagtactgattatttatctaacacatcttagttgttttattatttaaccttttcaaaaccctgctggagtatgtttcactatggtttccattatacagatgaggaaactgaggcttagagaggtgaagctgctcagagcagggagcagagggagataggactcaaacctcacatcccagaactttctggctggtgtcctgtgtgatggggatgccttttgcgatggctggggaagctttgggatgtctgggggccctacactgactccagccacggcagccttggggagaattcagaatccccctcattaaccccggtgggcctcacgaagatgatcaccgtctgtgtgtgccgtgatagaaagatgtttgagaagcactgctgtacttctgataagacttcacataatttctcttaatgtcaagctaatttcattacaacaaaaagaattttcaggtgctagagtttaaatatttaaatatgtaaatatgtgttgtatttttatattgatcatagttgtacatatttttgaggtacatgtgatattttgattcatgtatacaatgtgtaatgattaaatcagaggaattgggatattcatcatcttacagatttatctttttttttttgtattggaacaaattcatttttgtttgtttgtttgttttgggacagggtcaccgtttgtcacccaggctggagtgcatatcttactatagccttgacctcctgggctcaggtgatcctcctgcctcagcctcccaagtagctgggactacaggtgtgtgccactatacctggataatttttttattttttgttgagacagggtcttgctatgttgcccaggctggtcttgaactcctgggctcgagcaatcctcccacctcagcttcctaaaatgctgggattataggcgtgaaccactgcacccagtctatgttgggaaggaatattataacttgtctcctctagctattttgaaatatacaataaattattaactataatataatacagtatgatgtaataatatatagtattgtatcaatactatatatgattaactgtaattttcctactgtatcatcaaatacacaaacttattccatctgactgtacttttgtacccattaacaagtatgtaaatatttaaatgtagttttaaatatttaaatttggaaccacatttacacgctgctgtcacatcatcacaattagttatcatttctaaaggctttcctatgtgccagccactgagcaaagtgccaacaactacatttgcttttccattcttgccttctactcatccataacccattgcgctctaaccttcaccttccccctgtccctgagactgctctttcaggagcaagcctaacacagtagaaagcacctgggctttggcataacatccacgtagggtgaaggacagattcccctgttttctaagaaaagtaaatggctgctgggcaggcacagaacaacatttactctagagacagtgatgaggatagctcagaggacaaccaaaaggataaaaaagaagttaggctcttggagagaatgagtaggtcagggagaaaagttccaaataaaagttacaaccaacatgagaaaatacacctccaggaatgatggtcagaagttccataaaatggtagaactcacaagtgaggaagtggaaataatgactcaggaaacatgtttacgaccatcaaagaaataaaggagtgaatcactttcttgaaatgagaagaggagtggcaggcattggtccactgcccacccaccccttttcctttttcattgcgaatacagctccatttattttctctatgcctagtattggggaattcattaagccttggaaatcctgttcccttttgtctgtggttggttgagatgtcatgtaacacaagcctgggcatgaaaggtaaggggcttttgaaaaaaggagaagttcctgaaataagaaaaaagaaatgtgagaagagttgaatcgttgtcctcttctgtactccactttgaacttggtcacaggagtttttgaagcctagagttgaggaagcatcttttgtgtataaagaaacaaatgtaaggctgaaaatccaaaatgctaaagatggcagaggaaagaagggagagattctgggagcttgaagatatttttggttcaccttctctcacaaacaaagactacaactacctagctacaaacttgttgttgtttgaatagatgatagatggagaggaggaatggaaagctggatgtctttgcttacttaggaaacggttgggtatttgctgtttggcaaaagaattgcaactaaaacaagtgggttattaagaagagtcagatattttaaagatgaaaaataccaaaaaaagaaaaataaagccattgaaacaaaaataaaaatgtgtaatgtaaaattcaaatgtggttaaaaagcacaatgtggaattatattagtgccttataaataactttcaaataaaataattatgaatagtttggcacatatgtctttttcttcttttctatctatcattattgacttttaatttcttataagcattgttacatactattcataatgttttgcagattcctttttcaattgtctttgtataaactgtcaatcttgcttaatctttttaacgactatgtgatattctatagcacagagcaagttaatacatccttcagggatggcaactggcagtagctgaactgaaaactaaaaatgtcaaatatttgcatccctagcaattatcctataaaatatcccccaaataatgcaaaaatgtatgtagcctagaatatttattgtggctttgtgtgtactaaaacaacaacaatagaaacagatgataaatcccaaatatgactctattttagttcttgatcacatcttttgattctgtgttagcattttccagaatgcaacatgcaagggcctactttctgtcgtaatattctccagaatgcaatagataccaatagtaaattattaatattgcctacttttaaactttttttttaacaagcattctgctctggtggctgctgaatattgttgtcacttcagtgactaattgctttcaccaaaagagtgatgtggagtacagaatcacctacacatcactgtttttgtattctgtggttattaatggactaatggactataaggttttaatgaatagaacataaatgcagagacaggaaaatatattagttttttttcccaagagtgatatgccttaattacacttaactcctcaggttattagctacataactaccggtggaagaacttataatcactctcgcgtgaaactaatgaatatgcttttacacattgaatatcattttatcatttactttagacacaaaaaaagactggcttttctgtgaacatgatgataatatcatgtcatttattcaaatattagagaacctgtcacatttgttccataaatacttattgtgtgtttattatgtgccaggcactattctaggttgctggggttacagcagtgaacagaaaaatccgttttgggatagggaactgttcctactctcataggaagtaaatgaaatttctatgtggattgccctagttgaaacttagggggaaaattttgatgtatgtcattaaggtggacatgactagatggcttatactttgattgaaacaagccttcttttacaaataattgataacaatcagttgcaaaatcaaaattcacaatggttatttgactactgaatttgaaatttagaaacatttctatagtaataagctagtattttaaacttcagatggagaatttgtagtgggataatatgaaaatttatttaaaatatacttgttatccattatcttttgctgcataaacaaacctgcccaaaatcttttggcttaaaacatcattttttccaactcactcttcagtgggctagcaaactagggctgggcttagctggaatggttcttctctgttccacacagtgttggcttgactctttcaggcatttgcattccgttagcaggtcacctgggtctgcgtgctctcacgtgacctcattcacgtctggcagttggctggggcttctccattctcatctatattgtctctactagagtttctcttgcacgtgttcacacagcaataacattggaaagctgagaccagaacctgtggggcttctcgggggcctaggctcgaagttagattgtcatatcctctccgttcaagagaatggagaatagatgccacatttctctctctctctttctttttttctttaggcttcaaatgagtcctttaatttgtatatcaaagtcattttttcgtgtagtatatgaatgtttaataattacactctaatttacttgccttgtttactgataggcgtttccacatttgcatttctgacataacttcttaaaaaattttacttcaataggtttttagggagcaggtggtgtttggttacatgaataaattctttaatggtgatttctgagatgtcggtgcacacatcactcgacagtgtgtactttaccccaatgtgtagtcttttatccctcaccacctcccaccctttcccccaagtccccacagttcattttatcattcttatgcctttgcatcttcatagcttagctcccacttaggagtgagaacctgtaatgtttggttttccattcctgagttgcttcacttagaataatggtctccagctccatccaggttgctgcaaatgccattatttcatttctttttatgactgagtagtattccatggtgtgtgtgtgtgtatgtgtgtgtatgtatatatatatatatatatataaaatctatatctcacattttctttatctactcatagatagctgggcatttgggctggttccgtatttttgcagaaaaatagactgcatatctcaatgaaagaactgcaaagaaatgtgtggtgttttataatctgccacattgtatcttattctgttgtataatataaattggtagaaactaaatataaaaatagcacctaacttttatgatattttggtggtaatttggtatggttagatttgtttgaaagccaaattagagttctacttagatgtccccatcatggaacagggaataaattctccattctcttcacagccagttaagcgcaacttatcatttctaataaactatactcttacttcccagatgagttctgctagtctgttcttgtcagaaagacacatgagcagcagcttaccaggtggctaggttaatttttaattgtcatgtttattcctgtgaaaaatagatttgcctgatgagctgagaaaaatgaaggagatgcaaaaatggtgggttgaattctcacagtgtccaatttactgtcttggaagatacacaattgctgtgttgacgagggtttgggaaacagatatcctggtggtgggaatataagttggcaggtccattctgaagggcactttgtagatttctacgacatccagtcatataacattttaaaagtaggcctcacctgttccttcttattgggcatacttagggatcatttccccaaatgtgttccaaacggcgctagttctagtagaagtaaatgggtggctccaatcaaatgttttcttgggcaaactagtctgggaaatacatcatatttcccatgcaaagagaactattttctgtggggccttggggaagggggaagggagtgctgcttctaatagctcagattgctcatatcttcaggatggaccaaggaaacaaaggcattttaaggtacattattgtactgtggtccctcaaccccagagatctcttgcccaaatggtaatgcagctgattgtccgttggggcaatatcaagctctgaacttcagtggtatactgtgccaagttgttttcatttaaagatgttaaaaagaaaaactgaaaggcacaagttaaaccagggagttttgtccagagcaaaatgtgtcactaagaattgtcaattggaagtttgctgctatcaatatttgggccaaaaatatttatgaaattgccaatcacacgcagtttctccatcgccaaaactatacttcctctttactccaatctggggcagagagttatagcccagagtgttggtcagtcagtctctgaattaacacaacaacattaactagtacctgttgagacctcacgttgcattaactatgtgctagaaatacagtgttagaaatgaaggatgtttccaccataactgagctcttccctccaaatattcactcccttgtttttacttttcttatttagagagacagtatatagcaacatgatcaatagtataaagaaaattgtgaaaaactctgaaattcagtgggtgtcctgactatccaactgggctagctttgcctttgtttgccacggtctcgtcaattttacaactctgtaagaaagctgatagaaatgcaaataattcctgtccatagaacagcaaattgagtttggaaaaatggaattgattattgctgtgtggatattgactgcttttgctagttctgcaatcgtttgtaaattcatttctgctttccttatctgactataaagattctttttgaaccatgtcaaaactagtcgttctctcattaggtaatacgttacataattttttgacattttatcttttatttgtgtgtcatgattatgtcctcttataaaagttatccttgaatactagcgtgtactcttaagtctagttgcctgagttcaaagtcaattgtctggctctgccacttacttgaagggacttacttactttgctccagtttacctaaatctgagcctttgttgacaggcttattttgtagaatgagaataattgtagtattgtcagaggcatttgaaccagagctactccatcttgaataggggctgcgtaaaataaggctaagacctactggggctgtattcccaggaggttaggcgttttagtcacagggtgaggtaggaggttggcacaagatacaggtcataaagacgctgctgataaaacaggatgtggtaaagaggcaggccaaaacccaccaaaaccaagatggcgatgaaagtgacctctggtcgtcctcactgctcattatatgctaattataatgcattaggatgctaaaaggccctcccaccagcgccatgacagtttacaaatgccatggcaatgtccaggaattaccctatatggtcaaaaaagaaaaggaactctcagttctgggggaaatccatacccctttcctggaaaacttacgaataatccaccccttgtttagcatataaccaagaaataactacaagtacactcagtcaagcagcctatgtagccattctttattccttgactttcttaataaacttgctttcactttactctatggatttaccctgaattctttcttgcttgaggtccaagaaccttctcttgggggcctggattggaacccctttctggtaacagtatctaactagttgagttgttgtgtggattaaatgatatactatgtgttaagtaccagtatctagttaagccctgaaaaataggtgctaccattattaattatcaatatttatggagcagcagctgtttgacatcagggagggaacaaaatatacatggcctctggattcatggaacctgcagcctggtgactactctgagaagctagtcacttgcaaagcaatttgaaacaccactgcaagaaaaagcacagtcatgcctctccattgcatgagttgctttcttgtaaagaagtgcttagtgcgagcattacatttagacttttactgtcttccctatacatttatttccaagttaatacccaatgatgagctacttgaattaaattcttgtaagttttaatctcattctacctaatgtgtttgataatagggtggctctttctaaaaaccaagattaactatgtccccttgggaaaacgtaattaagctgtgaaagacacaggccagaggcactccaaagccttgctgttcagaatgtggcacaggctcagcagcagcagcaacagcagcagcagcagcagcagggagcttgttaaaatgcaggtgctgtctcaggcttcctggatcagaatctgcattttaatatgatctccaggtgatttggatgcgcataaaagtttttaaagtatttctctggaaattctgactccctctccccacctaacccacagatatatctctagctggatgagttgcgtgttttaagcatgaaccagcctcaccactcagtactgtgaatttataagtattagttctattgcaatctccttgagaggtaggtctccttttcattaatttacccttagcaattagtattgtagcacatagcacattgtaaaccctctctaaatactggttgactggctgaatggatctgaatttcccaacatcattagctctatacaatttagcatcgagctggatttttccaatgaggcaaacacgttctcatgaagctcttcaaagacacacaaggagaaggttctaacacatgggcctgatgaattatgtgtttttgatgactcattaaaggaagagggagaggtgaaaccaagggttactctattccaggaggcagcgttgtgtaatgataaacacacacattttgatgcctccaaagtctaggctcaaatcctggttctgttccctaccagctttatagtattgtgccaaatttctctgagcctcagtttcctcatctctcaagtgggaaatataataagcttatgccttagcttggatttccctgaaagcaaattctgagatagggatttgggtgaagatagtttatgggggcagggagggatggaggatccttggtattgagaatgaagtagtgggaagagtaaacaaaggactaagaaaagtcataagcattttgatcaagaacctgctgagaaacatagggaatgcctcccagaatggttcattagaaggatgggaggtaggtcccccattggttgaggggtgtcctcaacagtagtaattccttcgcaatggcttgtcccaggtgagcctgttctcaggaggcagaagcagaaactggggtgcttgaggtgcacctgagactgaacaaagctggcctctgcagctgcagatgaactcagaggtcacagcaccatcaatgtctgttacagctttccaagaggatccagtgaaatcacatttgcaaagccaggtatcacaagtgctcgaaaaatgctaggagtgtcacccactcagtgctgctttggggagcttcagtttcactcctcactttcgagaagtgcaaacaattctgttgacactttcccatccttgcattctctctccttcctcttcttctcactctgtatgccctcaaataagaataaatcttgtctggatggcaataagaagcaaatctaatcagatttgggagatgtggtcaaagctcagagaataaacggttatacagatcctttcccgttccgtttctgtttccagcctgccatttttacctcactgcaaagagaaaatggaattgatggagatataggaaaaatatgtatgtatgtgtgtatagatacaaaccaatatatctatatatatttacattggtacccagtaagagtgaaaactctaaatggttgttgtcagggacaatgtgtgttttcccagattttgttctgtgaattgaaaccgactttgctattataaatgcatcactataattgccctgatttagcctggcagttatgactcctgctcagagccaaatgtctcccagccaagacccagtgagcttgccaaattgtttcacctcttttattgtcagaactcatcgcccctcctcacactgttgtgcttttctataatattttaggtatattaatcataaatcctggaattgtttatctacaaaaaattgaagtcagggagtcatggaatagtcatttatcatgggctttggctcagtgacttgaaactaaaagtagaagaaaaacaaaagcactgattgtgtagaggtggccaaatgcctggaggttaagtgaaatgaaattaaagaaaaaagaagtcctctctgatccttagcagaaattattcactttctgaaagaagctttttctctattgagacttctatttggaaatgtatattatagatttttttttgcctgttaatctgctaaatgttcatttaacaatagaaaatgtttgataataaaaccattgctttttctgatagaggtacttcaattatgaggattttataaacgtgttctaagtattcaatgcttaatagtggggttgctatactattgggtgagatatcaacctggtgtgctggcagacttacttctacacagaaagagactttttgagaatgaagccaatacaagcaaaacagagcctagatgttgatgacacctgatggtcctggatacaaccatgcctgaagctggttttcctgctgcatgagctaatattccagcttttacttaacccatttttagccaaatttctataacttgcccttaaaagtcctaattaatacatttgtccagcatgtcacctgcttttatcatttttaagacaaaagttatctaactcagcctgaaatgtaaaatctcaaagaaaagtgcgttgaatatgtgctgctgaaatgtgtgcttccatcattaaaaaaatccacctgacatttcaatttaaataatggacttacagctttcattaatatttaaaatagccttgtatgttttgcaagattaaaagtgatacaagcagaatcagggttattatttaacaggacaggtgactttgtttatttaatattataataaatgttattaaatattgagataagaacatttaacatgagatctatccacttagggaatttttaagtttacaatacaccattgttggctatgggacagtgttgtagattatatctctagaactgtcccatcttaattaactgaaatttgtgcccaactttcccacttccctcttctccaagtccctcattccagtctttgactctgtgaatttgtagttgtaaaacacactaaaaagttatcacaggcattttaatgttctggaggcttgaccaacatctgctgcatgtctaggtatttctgaagtcatctctaaaaaggtaaaacttggaaataatcctatttcagtagagtaattgacatcttgcagatattataatagagcagagaagtgggatcaagttatcaaaatgtacttggcatattttattgatcgtttttttcctggtttaaaaactgagaaaaggaagcccaggtgtttgtaaacaacatttcatgtgacccatctccatatataccaccttctggtagcttccacacatttgatctactcatgccttttccataccccaccaaggtcatttagtaaagagaaggagagatttggagtgtgcaatcacaagtgtggatagtgagaagtgattaatagaagtaggtaggcaaaatgcatcttctgtaaaagggatgtggagctgttgtagagttgttctctagtttacaccttaacaaatagcagtttagagattgcttgtgggggttgttagtgtgttaggttataggattagctatgttgttgtggcgatttgcttaattaatggcaacaactggatgttgaaattgggtggtagtttgaatgtttggtagcacatgattctatcgtggagagtgtttatgcttttaaatgatgatgttttaaaaaggcaaaatcctgaccttcatgcaaatacaaaatgaagatgtgtcaaagattttctttcatttattaattgataagggaatcaataagatgttacaactggtgcaaaggagaatccaaagaacagacaaatatatagctcatcaaatgctgaaatgaatttctttagtaaatacaaaactagtcaatatccactggacaataatcaatggcatgccaccaaatatagttggcattcctgtggacaagagtcatttccattcctcttagtttttagctcaaagacaatgaaacatggagataaccttgatgtatgagctggacaaggaatctactaatcttaattttgttcctaatggaaaatctttcacatgtcttcataatgtctcagcacaagatgcttcttttatgggaaattttgtcttgctatcatgtttagaataaaatcccaactccttagcatgaccacagaaactttacaatgcgagtctttcctatcttcctgatcttatatctaacatcttcccacttctttccctgccacttcctactcacttttttcccctttgccttgaatgtcagaaacctcccagagttgagcacctggtgtattagtccgttctcacactgctataaggacatacctgagactcagtaacttataaaggaaagaggtttaattgactcacagttcagcatggctggagaggcctcaggaaacttacaatcatggtggaaggggaagcaaacatgtctttcttcacagggaagcaggaaggagaagaatgagagacaactgaagggggaagctccttataaaatcctcagatctcgtgaaatcttactggcctctcaagaatagcatggggaaaaccacccccatgattcaattagctcccaccaggtccctcccatgacacatgaggattatgggaactacaattcaagatgagattttggtggggacccagccaaactatatcatctgggtatgctgtcttcttcaactagaaaactctggctctgtatttacaggtttcagttcaaatcccaccttctgagcgacatttttctgaccatccaatcaaaagtatttatctgtgtcaatctccctcatactacccttcttgatcctcttcatagcacttattattccaagcaaccttgtataattttacggattacattttatatattgtccaccccttcccctactgtaagctcaatgaggacagtgaatttgtcttattcactgctgtatccctggttcctaggacagtgtctagcacatggaagctactgtataattatttatatgtttaaaactatatttattctttggaaatttatttgtgcagtactgtcttagttatgataactttagacaaccctacctattgcagatgtaacccccaatccccaagtctctgtggctttaatgcaacaaaagctcatttcttgtttaggtaagagtccaggaaaggtgtcctggttggatggcttttgtctaaagtcctggattcatggatccaacttccttacatcctgctctcacaccatttgcaatacctggcttccaaggttgcttggttcatctggaatgagtcaaagaagggaagatatatgggaaggtttatgggcagactgggaagtggtatacatcacttccttcatattccattgtctggaattcagttatgtagccatgcctatctacaaaaaagagagagagaactctgctccagccctgcacccagaaagtaaagaaaatgtgctgggcattgtgctggaaacagggacttagctgtgagcaaatgaatattttcaaaattagagcttttatgagtataggataagttgttccggacagaaatgcttatcaaaaaaaaatttaagattttaaatattttgttgtaaaaaatcagagaatatatgaaacaagggattacaagttaatatttggaaataatattttcgggccaagcctaaacaaaggatttgaaaagaagaaagtatagcagagggaatttgaaagcagaaatatgttagataaagcagcttttggctctaaaagccaaaatcaaatattatgttttccaaaagagatttcaggtataaagttgaactttgtcacctgaaataactgaattatattctctttcctgtttgtagacactcaaccctataatgatagttgaatctaataaaatgcaaatactcattttaactggagtcgactgattttatagacacaattgttactagattttcctatgagaatgatgacataattgaattgctccttttaatcctttttcttaatatctgtttagatggaaataagaattttgccaataggaacatattaactggattaatttccagttctgtgggacatttttttcctctataagaaaaaacatctctccactcagtatagatccactatgacaaattagtattgtcctttgttcacagctcacagtaagagaaatgtaagcaggtattagccaccccctgctcttccaatagagggtaattttaatgtcttgcaatttgaagacttaaaaaagaaatcacaccaaggtaaatcattcctttcaaaatccagtaatagaatttgtcatgaaggtcaaaattatctaggaaagagagagctaattcatgtgtgtaaagcaaaagtgggctgtaggttaatacttaggtttagtgaaatgttgacttttggcttctatgtttttataggttattaaataaatcagcctagaaaatgatttgctttactcacactgtgcttatgaagcaacacagcaaccaagccaagcctaacttttcagtatcaatctcatctatagactttggtttggctgtcttaatatgtttgagaaacaatcctcttaaagattgtaattacaacctgttgggattgtagctattttgtagttagcaataagaaatttgcctacatcaaatagggagtgatggcatgtgccctctcttctaagacacttacagtgtattagttatctattgctacctaacaaattactccagaacagtggctgaaaacaacaaacagttattatgtcacatggtttcttaagtcaaaaattccagagcagcttagatgggtgtctctggctgaggtctgccttgaaggcccagtccagacatcactggggctgcagtcgtttgaaggcacgatgggggctggaggattcacctccaagaagggtcatggtgcaggttgttgccaggaggcctcagctcctcaccatgagaacttttccatgggctgcttaggtatcctcatgttattacatgtggctttccccagtgtgagtgatccaagagggcaaaatggtacccgcaacttcacttatgacaagcttcggaagtcacactctgtctttttacaatatcctagtcagccctattcaatgtgagaggttttgacatatgagaagatggggattgttgagaccatcttggaggctggctaccacaataaatttattgtgaaataaattagaaggcatatcacaattttgagggtctttaagttggtaaatgacaaataaataaatacgtgcaacttagcagaaatatggtattttgctatttaagagcaaactggtaatcatgagataaacttttgatggaccttgaaatgcactaactcataggcttaatagcaacaattctttgttctatgtaattaacacactggctcaaaaaacaagtatctatttctggcagggagaataaagcagaaaacaatcacactatagttttctctggaatgtatcagcaaatatgtacccttctgtacacttagctggtgaacatccaagaagctatttgactttctcaagagatggtagattcctgctagagtctagttctcaacgatatttgttagtatattatcttaaaagcctcctacatttaacttttgaaacccgttttatgaagcatttaaatgtgaagtttgttgaattatctgcaagtaatacggttattttatacatggaaccagtaggcgtgaatatgagaaaaagatgggattactcatggaccattgattttttcatttgctattgtagtaaatcctctagtttaccttgtattagatcaattaaacctagagtcataagactttgtttcaaactaactgtgaacttggaccaatcaatcagtcactaagcctatgagttagtgcatttcaaggtcaatcaaaagtttatctcatgattaccagtttgctcttaaatagtaaaataccatatttctgctaagttgcacgtatttatttatttgtcatttaccaacttaaaaacctctccaagtctaaatttcctcttatataatgttcattcatttatgtgcctatcacaggtatttgtgtcttatactattctagaagttggaaatgcagtgatgaacaagagagagagttccttctcacatgcccttacattttagtggggggcacaaaataatcacatagctatacgacaaggcagttgatatgtgctaggaggaaacattatcagggttgtggagggtgcaatttcagataagaagttagggaaggctgctctgttgagaacagacctctgaaggaaagaaggcacagggtcatacagaaacccggaggcagggtttaaggcaatacattggaaagtgtctgatgtgttttaggaacagaaggaccaccaggtggttcaaacccaaagagttatgagaagggaagtgtgaagtttgtcgagatgatgagagctgtctgtgtttcaccataaggattctggaatttatctgacagaccgaggaagccactgtaggattttgagcagagaagtgacatcatctgacttaggttttaaaggtatcaatgtggctgctgggtgaaaaatgaataataaggaatcaaatagggatgaattgtcattgaatggagcaacacttgcattagccgaggtgaaaggcaaaagcgattgtgtgggtattgccagtgggcagagttggggagaaatggttgcagtctagatgcctttcaaaggtactatctctttgtcttctagatttatgaagaccattaaataagataacatatgtaagaacactttgtgtgtgtcctatcctgttaagaaaagccatctcatatgcatttttatttagctgctgacttaacttctttataatgctcatttttcccttaacaacatttttgaaaactattcatgtgtattagtcttattaaaatgaatgttcaaaccaggttgacaagcaggtaatgtagactttcccacccctcccctgtttacccaagagatttggtagttaccttaaaggcagaatgttataagtactgagatatctgcagttttttcttcttctttgggcataaaaattattaaatgaggaagaaggttgcattttataagtgatttgttggacaatttagggtggttgttttgtgtgttgttgtctaacattatctaaaataaatataaaccatccatgtaaatttagattttgtagcaggcacatcataaaacataaaaaaaatgtaaaatcaatttttatatctattgtatttaacccagtgtattagtcagcattcccatagagacagaactgataggatatgtatatacagtcatccctcagtatctgtgggggactggttctaggatgtcctctcagataccaaaatttgcagacatacaagttccttatacaaaatggtatagtaattgcatataacctatgcacacactcccatgtattttaaatcatctctagagtcctcataatacctaatacaatttaaatgctatgtaaatagttgttatactgtgttttaaatttgcattatttttattgttgtattgggggggtttaatttctttcaaatattgtggttttgtggttggtcaaatcagaggatgtggaacctgcagggacagagggcctactgaatgtgtatgtatagacatagatatagacatatacatagacacagacatgtagctatagacagacatagatatagatatatagacatagacacagacacatacagatatagacatagacacagacacaaatccagacatacagacatagacacagatatagatacagacatagatatagctgtagacgtagacatagacacagacacagacatagatatagacagacatggatatacacgtagacatgtagatatagactcagacacagacgcagatgtgtgtatctagacatagacacagacatatatagacatagatatagatatatgagagggaatttattaggggagttggcttacaggattatggaagctgagaaggctcatgatagtccgtctacattctggagcccctgggatgctgggagcatggcttagctcaagtccaaaagcctctgaaccagggaaaccaatgacataatcctcagtctgaaactgaatgcttcaggacccagggaggtgctggcacaaatccttgggtacccaggacagagggcctggagtactgatggccaggagcaggaggaagaaagagtcccagctctgaaggggagatagaaaagaaatcctttcctttccttttttattctatcttggcccccagcccatggtatggtgcccacccgcactgagggagatcttccccacgcagtccattgactcaggcaccagtttcctctggaaactccctcacaggcacacccagacatagtgctctaccagctctctaggtattccttcattcagtcaagctgacacctaaaattaaccatcacatgcaatatattcaaggtattataatttcaatatgcaatcaatataaaaagtcattgttgagatagttcacatatttttggtactaagccttttgagtctagtttgtatttcacacttatagcacatctgcctgccttatctccaaccccaacaagtggtcctaagcatgcaaacattctttgcccttgctcatctaggaggagctcattccctgtggaggttttacttctagatttctttgtgtccacatttctttgggctttaaataaaagtaagagttttttccccccctctttgttttttcaatgatttcttactgattggtataaaagtcttccctgtccttctctgtttgttcttgatttcagcttatttgtctgaaagtaatagaaattccttcaaattagcttaggaaaaaataagtgaaattgttgtaaaaacacacaagtgtcccagactttcagggaaatggtaagcgatgcctccaggagaacaagaaccaggaacaaaaaagccatcaggaagcagagaggaagagccttttttttttctttttctttttttttttttttgagacggagtgtcactcttgttgcccaggctggagtgtagtggtgatcttggctcactgcaacctccgcctcctgggttcaagtgattctcctgcctcagcctcctgagtagctaggattacaagtgcccaccaccatgcccagctaatttttgtatttttagtagagacggggtttcaccatgttggccaggctggcctcgaactcctgaactcaggtgatccacccgcctcagcctctgaaagtgctgggattacaggcatgagccactgcgcccagcaaggaaggtctttttcattattctcgctctggggctcaggtgtctggtagttacacatttgtgcttcactttttttcttctcttttcagttttctctgcttcgttttacataaagaaaattggccacccttgccatggcacaatattgtttcccagctcttttcccttcagctgaccaacatgtcagtgtcctattccacactcctaggaaggagaaactgcttagcacaactttcatgaggggtccactcttagtccaatcagctcttgccaagggccagggtctttccatataaacatggctgtggtgactcactcctgtgcttagacagctcttagagagaggggatctgacatcttctctccagatattctaataggtgatttaaaaatagaaccctctaactcactttgctccaatctcactcatactcaccaaaaagagccttagtgtaaagtattatttggacattattattggaggccatattggtatatatttatgaaatgtctgacatcaattagcatacatattaaatgtcaatcttattctcaaaaactaatttagaactgtctaaccatcttttttttttccagaaactaatttggaagtgtctaaccagctattgtaactgagagccccattttcctaaaagttatctttaccttttctgtttttccttgtgtgttcacctcttacttcgctctttaagaatgcaattgtaactgttaccttctctccaccaggcagttcctgcacggcaagcttatctaactatatgtttgcttagaaattctaaggaccaaatgttggaccaaaccgtgcaccctcagggattctctcctaccatgagattgacaatggtcaatttatagcccagctttacccaagatggtgccagacagaccatctaaggggtaagacattgaagcaagttatggggactccacacctcctcattctctctcctgcctgccactcatgccaagtgcccccatccacctttttttgagacagggtctcactctgtcacccaggagtgcagtggtgcgatcatggctcactgcagtctggaactcttggactcgagtgatcctcccacctcagcctcctgagtagctgggactacaagcatgccaccacactgggctaattttttgtatttgttgtagacatggtttttttttttttttgccatgttgcctaggctggtcttgaattcctgggctcaagcaatccacccacctccaccttccaaagtgctgggattacaggcatgagccaccatacccaacaccaagtgtcccttttaaagcccctgctttctgccccaaaagctgaagtgtttcccttagaggcaggagcctgtactgtttcccctcagctaagctctggagtaaagcttgtttaatttctaccaaaccttcctcttgttaactggacttggcaagcagcaagaggccagacctgcatttggttatactatcttctccaatagcaaattagcagattacaaatctcattgaataatcagaaagtaattctcatttattgcctaaacacaagtagcagtagtcttctcctgtgcacactcattgaagttttttttttactgattaatgtaaaaaaatttaagatctatattcaattataattatggacatcttactagggtcctgagggcagataacaaagtacatatgaatggcaaaatgagtgtagagtgagcgaatgatattccttcatagtcttgatttgagttttaagtttggggggggtccattgaataatttattgataaagaagtttgcctatatgtggctctcactgttagccaatccaatggcactatacatatggatgagatactaggtcttgtcttctcaatgatatcaacataaattactcacctgtttatcttctctcaaaatatttagacaatattgattctatcagggcagtaactagcttaatgtctccctaataaacttccatttaagaaggaagagatttatgcctaccaatgttagcagcaaaataatgtgtccattcaggcaggtccttctggggttgggaggttttcttttggaatctggaatgccccataaatcaacacaaggccttaagtactgaggtcattacagaattattggtaaaacatagtgttcgaatataatgaaacacaggccacatacgtgtccataaacatgaagccccatagttcagcagttacaagcccagaatgcaatgtattcgatgacaattttcaagatgaagagttgtagagctcaaccacgtactaaatatatcgaagatttagaattgatctatagtccaccgaggccctctgattacttactgatgtcagcatcactcatgaattatgtgtctgtgtgttcctcatgaatataaattccaatctctctggcgtagttatatggagttagatcatttgtgtgatgacatttcccatgtgctgagggggaaagggagacattttatagtgtttaaaaaacatgaacagttttctggcacgaagaaaatcatcaagagcccagaaaaacacaacgtgtctcccatctcctgctaacatacaatagtcaacttaaaccctaacaataattgtatttcagatcatatttgccctctctgcttctcaccttctgcatcatttcttgttaaattcagaaaaaaatgtagttgtcttaatcaaaaattgttttctggcagtctttagttggagggctctagctttcatggagatcatttgggctcaaaaatgaattagttactttctcttttctagttgttttttttaaaagtggaattagtaagcatctgtatcagtgaggattttccagagaaatagaatcagtacggggagataacaaatgatggatgatagatagatagatagatagatagatagatagatagatagatattcattgaatccaaggaattcatttatataattaagaaggttggtgtccttcttaattcgtctgttttcacactgctgataaagacatacctgagactgcgtagtttataaagaaaaagaggcttaatggacttacagttccacatggctggggaggcctcacaataatggtggaaggcgaaaggcacgccttacctggtggcagacaagacagaatgagaaccaagtgaaagggggaaaccctttatgaaaacattagatctcatgagacttattcactaccaagagggcagtatgggggaaactgcccacatgattcaattatctcccactgggtccctcccacaatatgcgggaattatgggagctacaattcaagatgagatttgggtggggacacagcgaaactatatcagtgggcaagtctgaaatctgtaggataagacagaacacggggaactagggcaggatctgatgtcttgagtcctgtgtcttgaggcagaatttcttcttctgcagggaaacctcagttttgatccagaggtctttcaactgatttagatgaaatcctcttggattatcaaagacaatgtcctttaaagtgaagtcaactgattggagatgttaactccttcaagtaccttcacaggaacacttagattagtgtttctaatgatagcctagctgggttgacattataaaactaaccattgaagtatcctttggttgtaaattgtagcacagctaatcaaactaacttcctaatattggctaaggccgactgagggttacttatatgcaggccctgttctgacactttatatgtgtcatctcatcccaagatctcactgctagtcatgccagagggtgagatttgaagtcaaccagtctgactcccaaggttgaacactgaactgctatactattttgactccaagtatctcaaaagaaaatttattcgattgtatatttgcattgtcaatggggtggctctagtttcaggtatggccagatccagagctcagaggatatgattaagacttttgtttctctatttgctttgttttcattctcaggaaggtcatctttttagtgacagctccaggtttatgttttctgagctccaaaactccggaggaaggagagataagagaacttccctttctcggtagttcagagagaattcctcagattgcctctgagatgcttgcttgggtcatccactcattcctcaatgaatgaccaaggtcaggagaatgggatgcgctggtagaccaggcgtgggtcgtaggtctacttctgaggtgagcagtggtgtactgtccctgcctgcagcacccagggtgagagtgggaaagctggattgtggttgaaaatcagggtgtcaacatcagaagaggaaatagatgctgagcaggcaagaaagacagacatccccagtaatttttgccactgcagattaagaacatcttctataggatcaactccaaatttcttaccaggactcaaggaatccttctcaattctgtctccagccttattttctgctctttttttagtttgctgccatcagactgatttccccctcgttgcttcctgccatgccacatcatcctgcatccctccctcttcacaggccatttccctgccgtgactgcttttcctggacacaccacttcgttttgcaaacactgactcgcattttaccattttacgaaagcctttatcatgctgccatgaattcattgatttgttcctttattcattccttcattaacacttattacattcagtgtaatgcaaaaatgttgaggatgtggtgggaaactgggcagacctggcccctctcctcatggggtcgtctcctttcatgacacttgatcatgagcctaacaaggttagggtctgtgcctgatacacctttgtatctctggaacttaaagagtagccccaaagaagatgtaaaggcaagtggggtctggagtcataccgaccaggttagcagtctagttctgctgtgtgaacttgggtgaattgttgaatcttcctgcacctcaatgtcctcttctctaaaatgggaataaaaatttctaccttgttagatggttttgaatattcaataagataatgtatataaagtgagcatcattgcatttagcatacgataagcattcaatcaaatagtaaacagctattattataataaatactcaatatatgcttgaatgaatacctggttaaatcaaccatgtgattgtaatggcgtcacttttcttgaggtggggagaaaacagctttcatggcactgccttctttcaaaagtgaaagccctggatttaaacacgaacataagaaacttgaaatgttataatgacacttcaatgtgaagacattgactcatccccataaaacagcttcttcaaagaaaggtgattacaacttaggtgtgcttggtggaaattctcactatgcttcacaaccgagattctttccttgcagtgttttccgtatttaatggagttgggattcgcgattccctttgagaataggtaacaaagcaaagttttatattttctccctcaagcaatgtaatgattaatggaatgtataactgccttctcatattatcaacccatttacccaaggactcagtacagtccttttcatattattttctattaaatgatgcatgccacccaacatctggagacttggcttcaaatctgggctgaagctacaaataaaagtggatttaattgtctctatttagtagattagcaaattcataatcgggccagtgctgtttctgggggaatttggaatggtgaaggctgaggtactctcacttaaggccagagtttgtgaactgagttggggaaagttaaaaagagacttctgtttttgcatgtgcacacggagacaaatgcagagacagacactgcagctgtttgtcatagctaaaaaagcaaaacgacctaattttccatcgacaggggaaatgagaagtaaacttgtttattcatgcaatggattatgtttcagcagatctacgtaaattgtacatttataactaggataaaatgcaacaacataatgttgagcaaaagaccccatttgtctacatttttaaagaaccggaaattatattatacattgcttaagattatatgtacacactctcacacacacacacacacatatatatctcaaagtctagaaatacgtgtaatagtcatctcagtaaaggaggaagaaaaacatatgagaagtaatacttaagtcgtatttgtaatttattattttatttaaaaagaaaagatccaggccgggcacggcgactcacgcttgtaatccagcactttgggaggccgaggcgggcagatcacttgaggtcaggagttcaagaccagcctggctaacatggtgaaaccccgtctctacaaaaattagccgggcgtggtggcgggcgcctgtagtcccagctactcaggtggcttgaggcggaagaatcgcttgaacccgggaggcggaggttgcggtgagccgagatcacagccattgccctccagcctgggtgatagagcgagactctgtctcaaagtaaataaataaagatccaaagaaaatataaaatattaaattttgatggtatgtatatggttgcaaaagtattttctgaatgattcaaattttttaaataattagaaccaataaaaagaataaaaacttgcaagagaattttgtgaatgtcagaagactaacacatattattgtttcagaacttctggaaggtagaaaattcactcccaacttgataataatgacagttataaaatgaaagaatcttctataaattactgaattttacatgtgccatagaaataatttctggcccaacagagattagaaatcagggataataataaagaaaaacagctggcacttctaaaatagctcatctctcctatttttcagtagaaggccctttctgctagtagaagtccttacatttcacacttctgttggacaccttcatcttttccacccctgcttcaatccctgcctggcaaatgcatttctcttttcttttctttttttttctttctttctgactgagtttcgctcttgttgcccaggctggggtgcaatggcacgatcatggctcactgcaacctccgcctcccaggttcaagcgattctcctgcctcaacctcctgagtagctgggattacaggcacccgccaccacgtccagctagtttttttgtatttttagtagagatgggatttcactatgttggccaggctggtctcgaactcctgacctcaggtgatccacctgcctcggcctcccaaagtgctgggattacaggtgtgagccactgcacctagttggcaaatgaatttctaagtcaagatatttcatcagaatagtttgtacctctggagtatttctttcctagggttgcagtaagaaagcatgacagactgggtagtgtaatcaacagattaattttctcacaattctggaggctgaaagtctgagatcattgtgtctccttggttgtcagggttgctttcttctgaggcttctcttcttggcttttggatagctgtctttcctctgtgttgtcacatgacctcccttctatttgcctcaatatccttatctcctcttcttataaggataccagtcctattggattaggattcattctgacagcctcattttaacgtaatgaactctttaaagaccttatctccaaatacaattacattctgtggtactatgggttagagctttaacgtggtaattttgaaggaacacagtttactctataacaccaagatttctagattagttttctctttattttcattctaccatcccacctcaagtcattttatctccacttcttatttttctttttttccatcaagtttgtttggctgttcagttggttttcttagaagattgctttgattatgtagtgattcaggacttgggtttgaagttacttctcacttttaatattatttatatatatatgactttggggatattattatgcctttctatgcccagttttctcatctgtaaaatggagtaataatagttcctgcatattatgttagtacctgtaccactgatggttcataaagtgatttttaggtggagtgtccaagtttaatttttaaaaaaccttctactgatgacaaaggatgcttactttctcttcatagcagtaattcaaaattttctttataaataaaatacgagttatttaaagtaactctgaccttcaatcttttattatcatgagaataatttctgaaatagtattgtccttattgcaaatgaatatatgtttattgttttaaaaattaggaaatgcagaaaagcaaagagaggaaataaaacttatttgtaatttcaccgtcacaaaataatcaagtttaacattttagagtgtgtatttctggcttagttcattttgtgttgttagaataccataaactgggtaacttctaaagaacagaaatttatttctcacagttctggtggctgggaagtctaagatcaaggcaccagcatctggcaggggccttctaactgccccctcacattcaggaggcagaagggcaagggagagtgagtgctgggttctcacatggcagaagaacagagaagagtgagtcagtctcacaagcccttttagtggtggcattaatccattcgggaagacagagacctcatgacccaaacacctcccactaggctccacctccaagcgctgttacaatggggattaagtttctaacacatgaatttctgggggacacattcagaccacagcaccttctaattattctgtctctctctctacctatcatcttttacaagtctttccaatagtagcattgatatggtttggctctgtgtcccaacccaaatctcatcttgaattataatccccacatgtcgagggagtgacctggtgggatgtgattggatcatagggtggtttccctcatgctattcttgtgatagtgagggagttctcacgagatctgatggtgttaaaagtggcagtttccccagcgctctgtctctcctgtcaccttacgaagaaggtactttcttctctttctgccatgattgtaagtttcctgaggccacctagacacgtagaactgtgagtcagttaaacctctttcctttataaattaccaagtctcaggtatttccttataggagtatgaaaatgactaatacaagcattaatccattatgctggacagttagataaatagattgcacccctaaaattcatgtctatcaggaacctcagactatggccttacttagaatctttgtagatgtagttcatcaagacgaggtcctatttgattagggtcaggcctaatctgatgattgatgtgcttctgagaggaggagaggacacacagaaagaaacacagcatgaaggacaccgtgtgaaagtggaagcagagattggagtggtgcatctatcacacgaggatcgctaagaactgctggcacccactagaagctaggacacaggtacacaacagattctccctcagagcctccagaagcagccacatctgccattgcactgacttcatctctaagctccggagctttgggagaatacatttctgttgtttgaagctacccagtttgtggtaattttttatagcctctttaggaggctatctatgatatagattttaaaaatgaaaatgggattagatcgtataagccatattcttttgtagcttatttcttttactgaagctactttaatctcttctgtcatttaatactcttctgcaatatagtttttaatgtcataatatttccttttatgagagtacattagtttatcagtctccttttatgattttagactttgtcataaagttgttcttagaaaaatgacttgaatgttagattctcataagaattaaatatggagggaccttggctgtcttggtccctgctatatttattaaatagtgctggacatgtaggaaaattgtccatcttattagacctattgtgtaaagtaaaattgaaaggacatgtgcatttttgcagctttgagaatgtattgccaaactatatatcagataatttttcaagtgtgaaactaagggaataatttttatttttgtttgcaaatgcatacaatatgactatagcaattagatttgtttaatcccaaagctctcattcctttatgagtctggaagtagtttgatatgcaaacctcctgatttagttattttagaccacccatttcgccttcaattattttgattttgtatcttcttctctgggacaatcatgcctcatatcatccaattagctcaaattcagaatgtgggcacaggaggcagaaattactcaacaacttgatgcttgtttagatttgagtcatacttatattttaaaagtaataattatagattatgattcaatgaataattctgtatgttatcagaaatattagtaagagaagcatgaaaatgtgtaatcataaggatgacttcattgccaactattgaaagctattttcaatgatttgtttttccccaaagagcagatggcttaatttcctcaaccatcttctggggaaaaaaacatatatttaaataataagaaacagaaaattcagttcatccttgtaacataacaacaagaaggtcttagcagtgcttatatttctttttactaaattatcagattaaagagaataaaacctaatcagcaaaaccgaagcctggcaagttatgaaaattgaagaaaataagggaagacaaaaggaaaaaaaaagagataaagggagaaagaagagaagtaaggagggagagaaggaaggaaagaagaaaggaaggacggaaggcagtgtaaatagcaactcccctttctaagaaaaatattttaaattaaactcaagcgcactgctgcttcctgtctcttagcagtcaagtactgttaggagacattctgcattagaagggtataactttgatcaagattttaccaaataaattaattgagttttaaacaaatgccatcttttgaaatactgcaatcatcaatgacattgaaaaggagactgaaatcgaaccttatctggttcctgttttgtgacaggtgctatgttcactgttgtgtttggtcttcacaacaacctggtgagctagatgcttatgtctgtttttagcatgtggaagattaattcagggtttgaaagtattttgtttaaggtcaagtaaaatgtggaaacagcgttaaaagcaagttacccctgactccacatctcctgctacttctgctcttctaggagggtcgtcctggaacagagacttaaacgtatgccaagggagcatgagcaaggagggcgagcaggctaccgtggatgggtgcagctggagagggtgcagtgaaagagcgtagtaggagatcaactcagtgaaccagccaaggtaggatcacctaaacccacgtaggcaatggggggactttgttccattctagtaacacagaaagccattgctggagtttcagcagagaaatgatacgatctgtcttaggtttaaaatacctgttgttcagagaatgggttgtagaagtttaagagtcgaaacgggaaggccttttggaaatgtattacaataatccaggatccaagcaaggcatgatggtgctttagaccaagacaataacgatacacatgaaagctatggatagattctgaacatgtcttgaaagtgcagccaagataatttctttgtaggttgactctggggtgcgagagaatgcgagaatgaagaatgtaatataagaaataagaaagacagccagattatgactctggttcattgttattttatatacagaacaattcctttgcccctaaaaatctcaggctgtcagaagacagttgtgacagaagaagtgttggaactcagcttcagggctacatgaaggatttgttttattttacctgcagtttttttttgctttttaaatatattttttgatatcagactcctagtatatgaagggtttaatgttagacatgtcctaaggagcagacggagggcaagccaatcttctagcttgtttatgacttcagcaccaaagaacaatttgttaccatttatttctattgccaagacctgagaaggttgggcaggtgctatagaaatcgtatttttcatcaatgcattattctttatgatcatatatctatatgctattctttcgcttgtgacagatgttgtgaatgtgtgtctgtgtgttgcgggaggggagtgtgaggattgtatggatgaggaggaggtctttttagaataagaaccatttgtttatgatcaagtttgaagtacagtgttattatatttcctaaggctctcatttaaatttgaaggtggagaaaactcaattttgctattataattggtgaatatttttccagactaaaattcaacatcttttttgaaactatcctcttttggaagaccctttaacccagtaaaatcatttcctctaggcaaagaatgtggatggagaagagccagcgggttggttccatagcaccctttagtagatagaagaaattatttcttaaatttccttgtatccaaagtaaattatagaacaaaatcttgaaatgcgttctgatttggaggactcagattgatcctgaaagcttcagtagttattttggagaaagaagaggtacagcatttctaaagcaaggaagaggagtggatgcaggcaaataatttctccaagtcagagagaggtggcaagaaaattagggtaattttaaaaggaggagcttagagagtaaggaatctgttcagaagggaaaatgaggccttattacctgggtgcatggatccaagtgggtgaatatagcaaaggatcatattggttatcatgtagagctgagtcataccctggaggttattgaaggaagatctcatgcctgctctcatggaacactaattctggtgggtcttcactttttcacctgcaaacgctttgctcattgactacttactgggagggcaaaagtttctgcttcgatactttggttggtctgatttgattccctcatgtggatatctcaggatacccaatacccatcagcaaagaattc

SEQ ID NO: 66 - DNA, 935 bp, Homo sapiens
aatcttttttatccatgagaattttcttggttctttagctagcatagactccccacagaaggtcccagaggaataagagtttatgaacagactagaactggagagttcgtggcagatgtgccaggttgtcagggggataaagggccgctccttggttctgatttcctcagcagcctgtgcttgatgccaagtggtgttgtccaacccagacctgattcctcccttgactgtcctccgaccttccaattctagctgcatggacattgcacacttggtctcaggagactccagtttcagtttcttagctggttctctgagtgaggtgatggggaatccctagcatttcttagtactgattgtgagcttcccctctgcatgttagcatgcagttcgtgacgattcactacaaatctgctctttatggagggagagtatagggggagcccagtatcactttccaaatcctacccatcctttgaggcccaggcaggccctacctataccacagtttgtcctctgaactctgagagcacttaacttcagggacacccaaattgacatttacatcaagggcatgtgaattattttctattttagaatagagtttgtacttcttgaaaataatattgtaccatgtagctctttttggtaatctttgcattgccttgaatagtgctgattttaaaactagattttaaaatataatttggcatagttcaataagtctgggtttcatgtgctgtcttctctatcccaggagattctgtctcatgttattgttaagagcatgtgtggcatgcctagcaagaaacctgaagccagctccttgagattgctccctctttcactctggagattcctaaaagtcaatgcaagaattctagaaaggagcccctgatggatgccaagggtgtcatttgaatgggcaccattgt

SEQ ID NO: 67 - DNA, 498 bp, Homo sapiens
atgggcaccattgtgtccaaggtgtgctgtggatatagtttgtgtcataagtgaaggagagctctctgagttcatgttctccaattggagtgccatggacacttcaaagtatctgtccaaagaacatgttcataagagatgccaaaaagcactgtgcttgtttatatccggggcatctttgggccacttggtctttagtcttccaaagactgattgccttatggaagtagagactgttcaacatggaatacttaataagcaggtgcttaataaacatttgattgattgatgaagggactttaaacttttccaaagatgctaccgctccctttacccctgtctggagaatgcctttcttccttactttcaaatttcctttgttggacactgactgcagatcctggtatcggcagtagcttgagtatcatggcagagcagagaacatcttgctcctaaggaatggactctagggtacctgttttcacctgcagtgttgtc

SEQ ID NO: 68 - DNA, 963 bp, Homo sapiens
atatttgactctaagctaaggggcttttcccactatgccaggctgcctttactgatgttgggcatggtcggaagagctcagaccacggctgccccctctcttcctgggaaagacaccctcagacaggtctttacatcccatcctgttttacgaaggtttctgagaatgagcagggagaaggacctacaagtaacctttatagtcattcagtccaaccacctcactgatgacttggttacccagaggataaagaaaagcttagcttaccagaaactccagcccctgttattatgaaaaagaacaggacaagtcttgagacccctagaggaggcctctgatctggagagaatcgacagaggagccagacccagagtcccctggagggagccaggtctgcagaagctcagaaactcagtcctgcctttcttgcatatggagtccatggtcatagtagcagtgtcctggctctacccagagtgtccaatggcttcctgtccctctggacttgtcatttagtgggcaaagtccaagatcacacctctcactcctgcccccacctcttgcccctgttttatctcacttgggaataatctgttcccatgtgaagccaacgaaaatgagcctccaccagtgtggggtaacccaacaggcagatttggtatggacacagggccccagccagatgaagacatcccaaagttgagaagagttcagtaatcagaaaatctaaaaagatgctcttttaatttcagcacacatgtacattttgtgttgtctggtgagtattaggaattatatttggagagagactgcaatctttatagggttcagggccttttaaggtcttactcggaccttggacaaccaagagggaaagggccaacaggtgtgaggaaaataagttgtgaggctgcagggaggaagaggatggctcaccaggatgaagaaaagggaaggagagga

SEQ ID NO: 69 - DNA, 669 bp, Homo sapiens
tgaaaagggaaggagggcttggcacaggctagcgggaagcctcaggtcaccctgacacctgttgccatggcccggcggcggtttcctgacttgtcaggacgtgtgcacagagagaacaatgggtttgccttgacaggaagatgcttcctgttttgctgcatgggttcattgttgggcattaagagggaggggtctatgtgtctgtgtttttcgtgttgccaaaagctctctgaggggagaagtgggggtgagtgaggacgggggtctgaggaaaggtgaaagggaaaggaagggagcagttattcttccagaattgctcagccaaacctcacgccattctagtttcagccaaccagagagggtggggctggccctgctgtcctactgtccccaagagctctaagcccagagcttttgtgcatgactgagggctgcccagaatccctccttttgttccccagtgagacccggtggtgacctttatcttggcaaggtggcaagggcgacaggaaacttggactgaaataacctctgtggtgaaagcaggggtgggaaatgttgaggctggtctcatggcgagtgataaattagacatccaagatgcccactccccacctccagcctgcccattgctgggccaaccctgcacattcacaaccgaaattgtac

SEQ ID NO: 70 - DNA, 786 bp, Homo sapiens
cccagcccgcagcaggttctcgacaacattcattcccttccaccctctccttcctcctattgacagagttgcttcagcccattttggcattctgtagatttctacagctgagaaatccaaaaataaacttgaattatggtgggtttagcaccgaggcacttctgtgtaaatagcagaagtgaaaagaaaaaaaaggccatctcatttctagtatttgaaaccaagcaccctcatcgtgtgggcgactcatagtagagggggcagggggagcgaggtttggcattttttctctgctgtttttgtttttgttctgtgatgatgtgggggactctccagggacatcatgcgtcacagagcaggggagaaaggggaggtgaagacagagcaagtagggaaatttgatccggtctctgacgttgtagggcagaattggggaaagagggagtgtcggtcaatgggtggaaaaggtcccgtggctgtcatgcccttcttacctcctgccccgagacacagttgggcaagtcccttaattcatttttcagtgagtttcccaagaaaggccgtcttccggaacatgtgttattcctgaaatacatggcagactcggttgaaagggtgtgtgtttgtgggtcacagagactcacaaaaagagaaggcaaggggctggcccgcttgacgtgagcccacatggatgggagtcacaggtgattattattattattaacaaaaggcttcccttacctccccaaacctaacttttcactattcataccatccatgtcttat

SEQ ID NO: 71 - DNA, 967 bp, Homo sapiens
tttttttctttttttttcaggaaaggcttttgcaggtgggtgccctccttctagcaggcctgaggctcagggaaggggcaggcctctgttcttgcctgttttagggcggtggaaaagacctcactcggccgtcaggagagtaatcttgtgcctagaaagttctttctgctttctcgtgtctaccccatcctcctccctgagcatggtgaagctcagtgcagcatgtttattttcaaaggcttgacaggcccaggcccttcctatctgttcagcctggtccaggccaccaggcaagctgtttacaagggatccaagtgctcggtggagagcagaacaggccgagagtgttttccacggctgccgagaaagatgagcgagtggaggcagaataacaaaaagccacttcaaaaacacaccagaaaaagtcacaaagcagagacaatcagaggtttgagacacacacacccccaaaaccctgacaagagagcgaaaacaagtcatgagggagcctctgatggtttcaagacagtcgcggttgctgattgagaacaggcctgtcccagcagttctcagaggagtcgggagctgcggctgtggggggtcagaaacttcacctgagttctgagaattgtggtgggacagtccctgagggctccgtctctctgggaagatggtggggggcgggtgagaatggcaggcccatgctggctgggtgagagtgtgaggctgttccagcctagagactggccaccggtcaggaagcagagtcccacctggccccaggcttctggcacctactgcctgagagcgtgaggcctctatggccatagtccacctgggaattcaaaggcgtaaggccacctgcatctaggaagctccttctttgggatctgagctgaggacccaacagtgaagaagccaagccagaagggaaacgctggtgctccgctccaccttgccccatttt

SEQ ID NO: 72 - DNA, 600 bp, Homo sapiens
tttagtccacttagggcatgggtggtatttaagctgcatgcctgactagacccaaccagacccgatcagactcagccttttagcaccaagtcgtttgggctaggatgcggtttgtatgagtttagtctacccctcactcaccttccataccccgacagccagaaaaagacaggtggtaacagtttccacctctggtttctgggcccagacctccaggcctgtacacagagcctggggcctggactcacacttttccccagttggctgcctgtcccagcatgggtctctgctgcctacatctttgtctgtttgtatcattttatttccttggcggggagcaggctgtgtgtccaggcttttgtaggcttgtcccttcttaggcacataaccccaaatagtgcttcatagaaggttgcccgaaactaccatgatgactgcagatcctaaactcctcagattctgctgggttcttagctaaaatggtatccaacagcccagccccatggtttttccaagttgacgaaacccagcttgtctcaccttttgatatcagggttacagggttggggtggaggtgaagggtgagaaggatcggagacc

SEQ ID NO: 73 - DNA, 665 bp, Homo sapiens
atgtgtcaccgccttgtcagacgagtgcatgacagagacttgggtgcattttctttgtgcgtggggtgaatggcagtgttggtagtgtgtttggcttggctctcacacaggagattcacctgctataggtttcagcttgtaggccccggaaccctgtgggtgcagctactgggaaatctgtctttcaccacatctttttgggttctgtagctgctcaggaagatgaggttttcttatatagccccagcccctggagatgctgggtgagttgtagaatgccaacttcgagagcattaagagagaccctgtaatgattaggcagccctgggattgtagaatggggaacccatggaaggaggagacccccccactttcttacctttcagagaagggaatcatcttattgtagcagaagtttcttaaaattttgcttggacatctaaccttgaaaactgaggttaagaaagtgaagggcttagtccatagaaggaattttcctctgcatgtagtttttctcctatcactacaaaaaaatatgaagaaaagaaaccaaattcgtaccaaggtgctaaatgtgccctagaatgtaaagcaactttgcattggtcaaccggacccagtcagggaaatatttccatttattcaacttgtgtacctaagagagg

SEQ ID NO: 74 - DNA, 655 bp, Homo sapiens
ggagagtggggttttgattagccaagactgggatggagaagtagcagcctcatggaagggaatgatgtgagctccaagggcacagtagttggttacacttcagcaaactgcaaccaatgagaacagttctcagaatcaggtcgattacacttataagaagatgtaattttttgtgtgtgttgggggtggtcagggaaatagactgtggacatgagagtgctgctgcttctgagaagtcctgaagggtcctgagaatgagccagctccatgatttatgtctgactaatcagtctcaactagacctgatgggggcaactgaaagtcaaaatttgactctgcagggtgagactgaactcgatgaacatagtttcatagttttaattgagatgctgctttttaatgagtgactgttagtgatgagtgattattgcttttcccatcactcacttccctcactcccctctttccttccccaccctttatcccagatgaggaaaaatcattggtaaaacaaaacaaagagaaagggatttagtgataaagactcaccttgtttcacactgaagactgaaggatctaaaggagaagttcaggttggaccaggagggcttctaggggagagaagaggcagagagagcagggagagagcacaagt

SEQ ID NO: 75 - DNA, 715 bp, Homo sapiens
taactaactaactaggagaaacgaaaaataaagtcttaggagccttgcgagatcccttttgttgaacgaaatgagtccagggacagatttattcaacccaagacttaccaggaacagtgatgaatattcacatgagtctgcttgttgccccgaagagcaagatttatgttcttgtgaaagttttcaacctaacactttatcatatctgattctttgaactggctttttaatgtagagtggcagctgtctctccccagctggaggggaaggaggccatcttctgcatctccttctgagacacttgtgttaatgacgatggcttgcatttgggaggcaatttcatcagttggcattataaggaaaatagcaggcctgccaagctcaatttactggcagaaaaagaaaaggagtgaagaggatattacttattaactatgaaatgcggaccgtacagcacaacactatcttttgaattccccatgattgcagaatcataaggctttcttctggtgtgggagcatactgacacccctcccttgtgctgtggttgtgaaaaggattatgtaaagatgattgctactttcaggagccaccagcctctcaactttatcgaggatgcaggaaaaggtaattcaggaaggatgcaattcacttcaaacctttaacaaatccatgtcatgaaaacctaattcagagaaggtcatttgctggaagg

SEQ ID NO: 76 - DNA, 1109 bp, Homo sapiens
gatcatttgctataatattgttttgcaaccattcaccacatgacaacttagacagttgttctcaggcattttgtatcttttttttttttttttttcaaattaatgagtctttattgagagtgtgctgggtgcctttctttgtgggaaaaccatattggccaagtctctaaagctgatgcacaccccctcattctgtgcaagtgagtctctcagagcctttcagcacccgcctccagtgcctagtgaggtagtcatgccacccgggaaagtgggcaatgctgcctaagaacagtgcccacattccagcaaactgtcatcccagagccttgcaacctcctctccaaacgcttgcaaaaaaacaagtgtgagcgctaacagactccttgccggaaaccaggtagccagagaagctagtgacgcacctgaggaggaaaccagggatcaggacacttcaaagacccagtgctggcaaggtgccccgggcgagggtgactgtcaggacatttctgcatcatccagttatgaaagctgattctatttaattcagtttaattaaaacaggggggccagttccacccaaaggcagaagacgctgtcagcggatgcagagtgagatctgaggaccaggaagcaaaagtagcacctccctcgaatctgccactgatgactgccatcaccccattactcccttccagttacccttcgcgactcactcatcccttacccctcgggaagacactgtccagggcagagtctcccagtccagggccctcggctctggtgaccacatgctctgcactaaaaatcagcaacacatgatcaggcaaatgtgaaggtccaaggcactagggggccagcatatttgaaatcgagatgcccaaagggcaatgagaccaggaattcaggtccctgttcccattgccttttgggaaaggcagtagtgtggcttagttgaactgaggacagacagggacttgctgggaaggggaaatcaaggtgcaggttctcttggaaggaggcaggatcacaagcgggtcctggggtggagagggggaaggtgtgagtggaaagagcaagtgtgcgtgacacaaccggcacagtcggcctct

SEQ ID NO: 77 - DNA, 544 bp, Homo sapiens
ttggtttccctcagaggcctgctggggccaccttttagctacactcttcacacctcattttcccacttcccagaccctctgaacatgtccttctctcttactggttgctcccagttttgctcatcccagggccttgcaccatgtgtagcacaaagattcattacgatcaataccagttagtctaggaactgttctcagagctcggtgacatccctggtgtgggtgcagctggggacagcagcgggactttgactcccatttcctctcatgagctccttggcctggctcccccgggaacttgttgtgagaggaggatcacaacaaggctgggcaggatgagggcatccctgggttctctgtgccattgaaatacaacacggcccctgccgcaggtgagtggatagtgggcccatgtggtttagcataacccagagccaatgtcctcaacagggctgccgatatggtagtgctcacccttcacctggaggcggctatgctccagggcacaatttgacacactttaacaggacagcgtgttggtgca

SEQ ID NO: 78 - DNA, 1507 bp, Homo sapiens
gcacgcttcattctgatccagtgattctttctggccttgagctgggaacatcagaacccagtcccgtggtggctgccagaagatactgttaaaatgcaactagaagaatgttgttttggttctttcacacatcagctgctaatctttgtaggattttccccttcccagggttaagagagagaagaggaagtgaaaacaggaggggagaattttcttaaagcacctcttgccttgtagacaacaaccaaaaaccccctagggtttgaacagtgctgtgtacttttttttttttttgtagcttgttcccatctacagcctgcctcatttggttctcagagctcccccaggtgggaggcagaattctgaactgccccaattccactcttatttgcagacagggggcattcctggggctggagggaagggctgaggactggctcttctggcagaaggaggtattttacagtcattctggagaggcactgggggtttctgagtttcttcatgaaagctgggcagagccttctctacacctggtggagaaaggtctgtgtgaacagggattaagctgactgtcctctgggtggagcccttcggccatggaaggcggaggagctggacttccgagcaccgattcagcatctgctgatctctcccaaccaccagcctctcctggctattggagatctccgactccaaggcccaagccctcccagttgagagctcccaagtgcagtatctactgccaagacaggggtatcttccccagagtccagtaggcatgtttccaaattttcttgttgtttaacagatttcattgacaactcaaaacatgcagctggctagtgggaagcagggagaatctggaggcaaatgagatggagccctcgttctccaagaggtggctgttctcctgatgcagacagacatggacacaaacacagtgtgaggatggaatggaagcgtggtggggaggggaggagagggagcgctacacaggaccaaggcagcctcaccattgcacgttggagccctgatgcccagtcccagggcatagtctcccaatccagggccccctgctctggtgacctcatgctctgcactaaaaatcagcaacacacaaccgggcaagtgtgaaggtccaaggcgccagggggccagtgtatttgaaatagagatggtcccagaaattcaggtccctgttcccatcgccctttgggaaaggcggtagtgtggctcagttgaactgagaacagaaaggggacttgctgggaagggagattaggtggtcctctcctgcctcctgggagttttggctggggattgggaaactgggactggaagagaagctggggatcagggatgtcaggagagaaggggcagtcttcactttgtttggcagagatcaagcgcagggccatttggcatgccagcagggctgaaaatgagccactgtaggacctgggtacacagggcccctctccccctcatgcactccgaggcccat

SEQ ID NO: 79 - DNA, 1603 bp, Homo sapiens
tgcactccgaggcccattcttatgcctctcagacaagtatggtgagttgatcctagattcagtctgggttggggatcagagccctgagcctctcccagcctgcactggccagcccctcctgtccttctggctagtctctgctccttcccatctctgccctggactttccccatagagccttcactccctcatgcaatccccttctctccacttccgctgccctctcccaactgctcagaagctgtgcttccatgaggccttcccttaggagtgcctgtcttccctttctgagctcccctggttcagggggccatgcatatgacaactgccagagggttttggttcatttctttgttctgtctccaaggttctgactccttggggctgaacccaggtctccttcacctctgagtttcccccatcacttggctcttcattaagccatcagtaagtactgcatgagcaaaaggacaagatttatcattggatctcagaggatggcctctgtctaccatcttattttctgaagaagtggctgtttgctttccaggaagaggccggggagagagctggaaggagggtccatagcagatttctcccaggaatctggaagagctgaagtctcatgaggatcaggactgtgggctcagggggcacctagccgggcgcttgggaacgacagaccagtttgctggtttaggcaggagaaagggggtagaaatcttgttaatttctggcagtgtagaaatctacccagtctaccagtttgggagagggttggttttcagggtgaggccagaagaaattccacacagatgtattccagctccttctttctgggggtacagagtagggtgagctataaagagtgaagggatgggaccacctccaagagcagccacctctgacccaagaaccatgtttccaaatggacagagttgatttaacaacgactcaaatatcctacaagttaatacctacttctttctcctcaatcaaggcccagtcatccctggggagaagccttgagtgctgggctgggccctgggtggggaatttaatgtgctgtcattttactgacatctgtagaggtttgaaactggacaaacaggaagtgtcctgtctttaacacttgcacaatctcaagccttttgtgaaatatcaaggagtggaggtcgcaggggcccgtggtgtgaggtgctgtgaggtagccctggacctgtctctgatcctgagagctgggccctctgcagctgagaacgtgccctgcagccgctttccctccttagccgtcgtgcacaacctgtgctgtgagacgctgctgcttgcctggcactgctgttgaatcagtctccatctcctcattttgatggcagcctgggtttgttatccttcaaagatcgtctcttggaaggacaccagcctctgattacatttccgagcctgcctggaggcagctaagctaatccgacacgatttgggtggattcccttctggcctcatgttctgacacaacctctggcagcagtagggtgggaagatggacaaaataattacgccctatgagttgaaaggagaattaaaattaattccctcgtgcaac

SEQ ID NO: 80 - DNA, 747 bp, Homo sapiens
tttctttatgagtacctagtagcagataattcagggctgttctctattccttttgtaacaggtctaatttatggcagtaatttttttaaaaaactatttttttcagtagaattttgtacatatgacttctataacatttaggacatttatccttgcttattataaaaatgatttaattgtagtaaacccggttttgaaaagagaagaataagagatcgcccataatcttaacactgaacacaccggatccagtttgttttcccaaccagtcttcatctgatagcgtgtttaattgcatgatcctaatatacatttactttttgaagaaacctagtttgcacggtcccatgtggctacataatctttctcatcatcgttaaggcacaaaatacctttaggatcataatttactcagccaacttcctgcagctgaaaatttaattatttcttttacctttcaaaccaatgtgtttgcttgtcttttctggactctgccctggggccccggcagagaggaggtggagccgtggaacagggttagacccaactcatcttcacgtcctgcccctcagcccggcccttggcccgacccctgccaaatggctccggctgtgttcaggtgcctgcggaaaggcgctcctacctgtcagcagtgtaagggcatttccaggtcacatctgtcaaggactttcattcatggagcacttgcccactggacacttgccacttgtgtagacacctcctcta

SEQ ID NO: 81 - DNA, 553 bp, Homo sapiens
atattttgggcctgaatcccatccattttttttcaagtgtgtctatcctgacacacattttttttcaagtgtgtctaaaactgtccattttcccctggtttatgtagacctatccaattcccttgggaaactcagtgggaaacatgaaatttactttcgaagtgggtggtgataatgaaaaattaatcttgctacgattctggtaagagaccagacccacacagaccctactttgggcattacctggctgaagccagcagcaaggcagcgcacccttctgacacgcacaggttgccaggggctccacatgcatcagccccctgctttggtgcatcacatatattgctgttgatgtgttcaactctgttgcaaagtgtttggaacagataacatcacagtcggatcatttatcaattctttcactcgcccaccttttgttgttgaaccacatactttgggtaataactacagtttattaggtatgctgtgaacactgtttttaaggagtgcctggctgaaaacacccacaaaatgatttaaaaacacaaagcta

SEQ ID NO: 82 - DNA, 730 bp, Homo sapiens
aaccacagccacctagactctgactgacatttgatggcttcaaggaggtattttaaagctattgtcccagaatacgtggtgtgttttttgaggaggaggaagatctatccacggcacacatcaggaagaggtggttaaaggtcagagagttattctgcagaaaatccatctgatttggtacttcctgaaatttttgacacccaaccagggatgtcttttaaaaggttccccactgctcacagattgacaggaaaccacaacaggggtaaaatgcacgcataacacagcatacatcagacatgagggtagttctctatatagcacagtattttttattattgtaggcttacaaatgatttaagtctgtgtgtttgtgtgtgtgtgtgtactttttcattttggtggtatggaaagctttggagggaagaaggaaaggattccacaaggaatagtttttccatatacatctcccattgcaagaacactgatctccgagtggattcttttgtcttgagtcttttgaattattgatccacaatgatgaaatccctagcacagatgttcaatcttgatgtcatttaatatctcgtacaacagcctgaggctaattttcctctctccaggaaaaatggtttgtaagagttgattgatcaactcaagcccaagatcacaaatataaacttcattggtaaagtgatctactctaatattatcttcagggattagaaaa

SEQ ID NO: 83 - DNA, 1325 bp, Homo sapiens
ttaggggacctgggaccaagtgctagacgggtgtggaggtggctgaccgagggtccttgctgccccttaaagtcaaggagtttaaggcagcctttcctttctttcaagtggctcctcaaagggagccattatctgcagctactgtctcagttttatgtaaagagtatttatcatttgggaatttcccctccccatataatacttttgactcctgaatgcatgcaaaagagctgtaagaaactttctggtgctaaatgagaaaatgtgtgaacataaatgagctagtttaactaaaagttcaccaaaatgtattttaaacatcaggctcttaaaaactcaatagtttgaaatttgcattttaatcagcgtttggctaacaatatgagataaactattagagaagtgtaggtcattctggcaaatagaaagttccatcatttcacacttagaaagctgccacgaagagcttattcttggagtataaaatgcagaatttaggttaagccagtcattttgtagatgaaattgtacactggcaatttcttatggttcaacctaatagtaaaacatttataaacaattgtatcattacaaatacatttagacatcgttttctgctaaactcagtattttcctttccatcctgatcaaagaaacattattgcagtaagccacattataattcagcacgatttcttctaaaaaggctccgagttcctttgagcttgttattgtacagtggatttttcatttgcaaagacgttaagccctccaaatgtgcaaatcatgaagtcagttgttgttccagcaaggtttgcccagcggtaaaaaacaagataaaactaatgcactagctgaaaccaggtggggagaccatgtgtggtagtgcttgggggtggagggaaactatttctgaaatgaggacttaaagtataataccagcttcactgcctgttcacgagaaaccaaagcttcaatttaactgcaggcaataggagtttcacactgtcagcaccaactgtctaaaatccaaaactagtatctaaatgtgtaggatcaaaaccaaaaatctggagggatctagttaaacttcaatatgcatgaccccagattcccctttaaaatatagtccaagtattttatcttttccatagggcattgacattattgtgttaatgtgaaatagctatttacctctccaaacctcggctttatagaatagataattatcacatcctgtaggagagccatttgaaaagacagccttgtttacagacaggagaagttacagaatttaaaactgttagaaaattgggggactatgg

SEQ ID NO: 84 - DNA, 1091 bp, Homo sapiens
ccatctgacttaattccctcatcaactgattgccagtgttgtatggacaggcttggtctggatagacttgtcttcccactgctatttccagccgggcaaaagaaccacttccattctcttagagctttcgataccacagtaaataacctggtatcttgctggggcagttttccacccatattaaactacatctgccccattttgactactagaaaatgtatcaaagaggctgtccaatttgtctgagatgagatggctgaagttcttagccaaataatggccaaagctcaaaacagatctatttgatacaaattcgttctttgacacacaaggaaacagatgtcaagagttgtttccacccagtatcaagcttcctcccctcctctctcaggaggctgaacacacattcctagtcactaatgtgctatgaactgaatagcagtgaatccacttaaattaactcatgctggtacagagtcctctccatataggcacaggacttaacatttatcatttagccattctttcaaagataattcaaacgttacagatttctccatattcctgttaatgtagaaacatattccctttacttttggaatcaaagaccaacttccatatgtgacaatgactataatgtaagaaaactgattttcacaagtgtcttgtacaaataagctactgcagcagtttatagagatagttgggtgagacaagggccctgagtacacaaatttataatggctgagtggtcattccacactgtcactgcattacagaaaaaaactggatgcttgtcttgcatacaaatatgtagtgcattaaaaacactgagacctttttttcatttttttttttattacatttggacctttaagaaacatataccatcagatataccactattcagtaaaaatctattctagtttttgggaagcttatgtgtcacaaactatcttgcttctagtctccaagactttactaagtttatcaaaaaggtgggctctggtctatgggatcctgagccttgaggtttggatgttctgattattgtaaaacaatttcaagtggattaacttaattcccagctg

SEQ ID NO: 85 - DNA, 1096 bp, Homo sapiens
tttttcttctggaatgggctaatcagtttgaattatctagtccattacaagaatattaaattccttgagctttgtgatctattctgtctttggaaaacctggtaaaaaagtaattttttttctatacaataaggatggatttaccagaacatacccagtattaatcataacaaaaagcagtatagataatgtatatgtgctgtgttcactttaataaccacttcataagtaactactctaactatggggactatttctggatcagtaagatccaagtgtagttagttacacactacactcagcttaacacaactcttggtatctgacattgattaaaagtaaaaaagggtaagtgaacaaatacatactcatacatgatcacgtttttaagaagctaccctttgcagaagtaaacaagagaggagactttcaggaagctactgatggggactgggaaggtttaaagctatggctttggtaagcaccccagtgagctgtaggaaggcattgtaagagtagattctgcagcatcaaaggataattctctaaaagaggtgggtgttttctcaattaatctaaattctgaggctttcagcagttgagggctagaaacaagatccaaagaaaagagccatcttcacaacacttaagaaaggtgactgactgagccattaggctcatgatgctaaatggtccaaaagcctttggtggtgtgatatggacaagaaaaaaaattaatacacaaaccacgtaacaccattaaaaccaaaaaacattttttcattaaaaaaagtatttagaacacacaaaacaaggcaacacttattcttttttctcatcttctggtatgggatctgttggtggctcctccactgttgcactgttgctctccgagccagtgttactatcactggttccttcctctgccatactgtcgaccccctcctgcccactctccttgtcctcaggagtagacgtgccttcttcaccattctgttggctctctgttgtttcttcaaggtgtgtctcctctgtaatcacacatttgtcactgtcagttccaagatgaaattttactctagttatgctgacagta

SEQ ID NO: 86 - DNA, 811 bp, Homo sapiens
aatgagagttagtctgtagtgctatggattaaacgaggagaaagcagttgtagaaataatataaggttggtcttttagacactttgtttaaagtcatgctgggctgtttcctgtaagaaattaaaagcatgaggttttagctctaatagtctcaaacgattttcttcaggttttttccttgaactaggacagaatctgagtaaagacctgcaaaccttaagcataagacatgccccattcatagatgccaaaacagaggcaaaggactgagtgtttgtctagttgcaaaattagcaaaaatcagttattttaattttcaagctcgttttaaccacaaaaatgtgctcatgctccaaattcattacaataaaaaacacattcatacaaaacagaaagagactcagatactgaaacttaaaatatgaccatttcaaatgttaatctgctggattaaattttgcagaaatacctggtaaagatatctatattccattacatgttttccagatggttgtcatctgagtaccaagtatgactactgtccctcccacttcttgcaacgatgctccaggaagcctttggttttgttttccataactacttttagcttagtcctgtttacacagtgtactaggcagtgttaaaacagtgccatgaggtaaggtgatctcaaaattacaagtgacgatcaatgtaatcagtactttatgtaagttttatttatacaagttattattattattttttaccttgagggatgcttttaatcaggaaaatcagtatacctagaagtaagggtttttctaggaca

SEQ ID NO: 87 - DNA, 1227 bp, Homo sapiens
atgctgtcctaggacaccaaagacaattaatcttaacggtaataaccacatcttgataaataatgtaagcatttaaaggttaaaatactgaatgtcaatatcatgtcaaatttagtactgggaatcaccctcagtggcaggtaccagaatacttgcacttagaaagaaaaacctaaattaaagacagccgtacaaagtcttggcactgcctctgcgtttgttgctagtgggttacctgtctccatcggaatgttctcgtcgtctttcttctcctcgcctttgttagctgcttgttcttcctcaggaacgatgctgctctgactgcgctcagcttgctctgcggcctccttctccctttcctcctgccttttgcgggcctgttcctctgcctgtgcaatctcagctgcaattttctccatatccacttctactttcagaccgcacaactaatcagaaaaaaacagaactccgtaatgttttttccttataatttttgagccagatatattctttcaaaagttggttttcttgcctataaactatatatatatatctatacacctgtatgtgtgtgtgtgtgtgccaaaaaaatgtggttctaggtcttctctgaaactcttgggtctacaagaaaaaacagcagctctagcagttgtataatataggatattccagagcagctggtgaggcaaaatagtgaaagttctggggtatacataaggcttccgttttacattttgggctaccaactagatttccttgtctgaatgcaaagtgcaaattataaattacatttaatgacgacatttgatgaataaatcacaataaaatgaaagtaattaatgactgtatgggagtttaacatatcagagggctctagcatttacaggcctagaagatatgtgtatactctatgatatttcaaatttattgcaattttgccagagaatgggaacaatcttataaaaaaaggatcctacaggtttataataaagttagccctgtttcaaagtgaacaacattcaataaaaacactattttggaaaaaagaatgaggaaaaataaagtaacaggtatagtgataaaagtatagttaacatattaaacagatacccttttaagttcattgttaaatgaatctgtgctttccaggaatttcctcttcttctcctggtgtcgttcctctatttgaagaagttcagcttctagttttcgctgcaagacagg

SEQ ID NO: 88 - DNA, 1284 bp, Homo sapiens
ggtccatactttcaaacagtgtaccaaataatgttttgaactttagatcatttatcacatgagtctagctaagatttaaaaaatacaaaatgcagcacaaagaaatgattatgatcaataggtaaatgttaaagaatactgtttcaggcctgagcaattccttgggaaaaaatatttagcatagcagtaaagattgataggatgcctcaaaattcttaagttcacacgtatttcttaacgaatatactttccattacaaggttctatattatagtttttaatgacaaacttattaaacatctgggaaaggtccacttccttaaacctcttctccaaatcaggaacaggttagattgacatatttaacaggtagatttaggcatggtgtaggaatcatatcacctgggatttgtggtataggcacatcttattgaaatgaatgttttatgactttacctgatgaaccattaaggactggacctgccgtttgaggacctgcattctagctgttgtgacaactgaccgaacgtctggcaccacactctcactaagaatttcactgatgaggcggtggtttctctggaaacgggcggtggctgtatgcttcattgaaaagccatcatcataatctggagtgaacaaattgttctggaaatcaggtcaccagtaaccataaaaaggagtgtaacaatgttaacacttaattaccaacgaactatggccctcactggcctaacaagtggacctgcccagcgtcatgggagcactggggcagttacttgataaaaaccatacagaggacgtaatgtgttcattggccaaggtagtaatttatctcacagtctttaagtgataatgttgtgtctgagaaggatttggctaaaacataaacgagatacaacatgtctcttctggcttcggaatcaatgtgaaggctgtatgtgatggcagtaattgaaattctgcccaatgtttcactctcttggtagtaacttaaggcatttaacaactaatgaacaacatatgaactgggcagtgactttgtcacttgtagcactttaaaaatgaatgaaaatgcccatttgtaaaattatgacagcagagaatacatcacctctaacaatattcagtttcccaggccctcaagtaattttatagaagaaaaataaatgtctgattccaaatttaatttttgtcagtttacacttagccagctgttgtcagtgtgtaatggtatgacccaagttcatacagtatgggtctggtttatatgcttctgtttcg

SEQ ID NO: 89 - DNA, 683 bp, Homo sapiens
aaaaaaaaaaagagctttctctttagtaatacatattaaaacaaacgctcctctctgaaccacttaatcacctcagtgacccaccagacagggaggaaccacacttaagaaaaccttgttacaggggaaaccctgttacagaggcctatgttgcgctgctatgtcagtttagcacctcccttattgtctggcacttaagtagttcctaaaattctcattattataaatactacagctaaaaactgttgtttttgtaaaaagttaaaaaaattacttttgtttccttttgagtaatttctttaggaaataaacttctgaaattaaaactactgggtaagatacagtttttttaaaactctgtaacctttctactttttaagagtttttcacctttagggttatatatggtacatctgtgctacatctgtctaagttatctgtttttgttgttagcttttgttttcttctttcatttatatggccccagtgttgaccacagatggggacataaggtctaagcaatttgggcttgttcttctttgcatgttagtcgtctgcttccttttttgggggaatggcttctctggttatgatctaattgaacagctatttatcctatgatgaagaggctctcactgaataaaagccttcattgtcttgtgtggataattgcacatgccctc

SEQ ID NO: 90 - DNA, 1727 bp, Homo sapiens
aatgtctatcttttgatagtcctctgttaaagaagtcagtagctgttgtacttcatgcagatgccacctttctgttatgtacatttgacatacatttccacctcccaagtattcctctttctaatcattttcgtactggtatgctaaagacattctcatattggcatcttaattgctacctgaatttactagcaactttaagacccaatctgaaagttaaaaacatcataggcccaagtttcagactgtttctgagtgaatctctttagtccttctcagtgttcatggtgttaatgaaagctttagttattttctacttacgttgctagcctttgtttcctcttgtactgacctccatcctcccaatatctgtagactggattgtcttctgatttttagttctgtatgtttctcttgcattaatcaccccatttgagtaattaaagtgtgaggatgctagtgtgtctttagcactgctgattctgcttaacattcaatactgtttctattccatattctattctctatagtattacattccactgtctgtatttatgagaacatttgacaatattccagtacattatttttaaaaatgacttctgtttttccccacttttatcaacttattcttgtcttcaggtactattattgcttcctccctcattgatattgtctttaaagttcttatagccttcctctttgttactgctactttaagatgggatcttaaatcattttcctgatgttcttgtcgcttgcagctaaagcttctaaccttttgcacatcatagcagtatacagagaaactattaatgtttatacagcacactagatatgtggttgagtgtgttcacactgcaggtggctatctctgggtctcctcgcagcttcagaccctgcctggctgcacaagaccagaacaatcagaacacctgctaactactcatacagaatggcaattaggaagctctgccattcgtgtgcatgtatacaatttgtatgggtataccctcatgtacacccatacaaatagtagcatgagctatatttatacattcttattggatttctgaattaaatggaaaggaaacttcatgtttccacatactcattagcttctcccttaagagcctttaattcagcgaatttagtgaaccaataagaaaacaagatataattagaatgcatttagctttttaaaagcagatgaggcaaaatcctgattgtgatttaaaaacctttcgtgcattttgagtacaaagattttgataaacaatcaataatttttgctattttctgcactgaaaaggatatttctttttcttgtgggaaattcacatacaaatcttactcaatataaccaaaatactaagacgatacttaaattatactttcttttccatttaggataagaaataaaaacttatacttaagagatttctcatatcttaactcacagagaaagcataaacaaaaccccactttttttcttttaccatctggatcttcagcaggctgaatgctcatgtacggttctcctttctccatgcgagattgtctctgtcgactttcttcctctaaagcagcttctgcacgactttttgcatttatgtaagcaaggtacgcgggggaattatgataggccttcatagattcattgtactctatctgaaattcaaatgttttttggttttataattaacattttgcaggttataatgcag

SEQ ID NO: 91 - DNA, 309 bp, Homo sapiens
agcctcagtactgcatcagtgttctgaccaaatcttatgttacttttataaatagtaagccaatgttttatgtactttacacattatctatcccactgtgagcccctaccctaccttttctgcttcgtattcgtttaaatattcttgtttttcttcatcagtgagatctcgccacatgccaccaataatcttgccaatctcccacaactttaggtcagggttggaagcctttacttggtcccagaccttaaaaagaaaacagatgaaatgttaatactgatgtctaaacgtatagacctttaaaaatag

SEQ ID NO: 92 - DNA, 436 bp, Homo sapiens
ataagcaagaatatctccaatcactacagacacttaggatgagttacttcaataacatagtctacgtctctaaaagttcatgtgaatttagaagaaaagtgcttaatttgcataacacggtacatcatattatcaaatacaaatataatagtcaagatcaaaaggtttaacatttctagatagtggttataatgctctgccttttaataaagatattggctactttttttattttaagagtaatgtaggctcatcaccaaaaaaaaaaaaaaaaaaaggaaaacttgaggaaaagaaaataaaaactaccataagcttactgcttagagataattattgtcttctgtgttttcccccttcaaactaacatgtggttgctattatttttataaaaatgagatattaattcatgtagtcttgcagtcctccttcactt

SEQ ID NO: 93 - DNA, 1026 bp, Homo sapiens
ttctggaattttgaaatcagaactaattgctttaaaaaccgtatttttttggacctttcctctgaatatgcacagaaaagctggctaagccgatctaaagttggatgttaagcaaagaagcagcaaagacagtgtcctcactccttaccaggtcctaagcacctacctttctgctgtacctcatgtagggcatcagcggcttatctggtggctttgggggttttggaatcgtgataccagaggatgcctacgaaagagttaaatacattcattattcaactgtaaggagttcactggcaaactgaaaagagagtcccttaaaaaattctaatgcgcctttcttctattcgtccaaatattttcttcactgaaaatagctatcactgcaaattcagaaatgttcaaaagaaaatgactttaagcacataatttttaaatgttttacttagcagtttattgccaatgctttgacaacctggctgcaagaacaaataaaatattacacagtaacccatacattgaaaatatatggttatatatcaaccgtctcaagttcaggacattacctggtaccctcttattctgctcaattaccattacacatacagtcaacacttgattatctgcagcaggatctgaacccttaacacttaccattctcacactgtctacaggggccttaacctattagcactaggaatgtactcccaacaccaccacaaaaacaacttcccaggttcaaaaacaaaaacaattagtgaaataacaaaccaccttacctcctttgccaggctagagattttatttctcttaaggttctgtctgttacctagtggttttcttgtaaaggggaatgagaagtgtgaattaaaagtcacacattgttttgtcctgagtcctaatcacagtgtaaaagcaaacaagtttatcaggaacagagaagtggcagatatcgggcctgattacgttatttttgaggtcttatatcaagaagctccattccattaaaaatgttcagttttatgg

SEQ ID NO: 94 - DNA, 1377 bp, Homo sapiens
tgatcagtttttcctgtggcttaaagtctaggtgagattccagacagcctctggtagaccacccagataacacccatctaaaagtatctatttctgaactttttagtctcctgttaatatacatgactgcatttgattaaagacccagaataagaaaaatcattgctatttcagacaatttgcaaattttcaggagatctctgatattgactctccctgctaggctggagaaatgaagtgttggctttattttaattatcgaaagacaggattggcaaatccttataggaaaactaaagtaacattttgttcgcttccccttctgttgttgctatgataaaaccccagagatactcctccactctgggctgggaccccaatcataaccttatttttcatttgagggctcagggattagcatgtttgtgtccttttccactatgatcaagaaatgtttcctcttcctacaagggtctctctccatccctataactctacttcttcaaagcatttcgccttggaagcagtatttcctctctttccattcctcccatgcattcttgtcacacctcatgctagtgcccaggtagacagacactgtttttggccagcagtgggtaagagagtgagatggccaggggcatggaaactgtcaaaagtggtaggatgggcagccaatacagggaaacctgtatcagggtctatagttctttcaaggggaaagagaattcctataagactaaccttatggattcagaggaacagacacacacaagtctgcttcttcacacataaagttactagaaagtatttccaactcatatccaacacaaaccttcagaattccatgaaatggattacaaataaagttggaattgtgcccataactgaggtggtaagaccactgtcaaaattttttgaaattaaagaggtaaagaattctaaaatgcctatgcttccgagctttaatatgaattaaaacactttaaaaacacagtagtatttgctctttgatatttttcaaagaatcacattttatattaatggaattgctatttcccctcctttctcccaaagaaaggtacacaaatcatctgtatattgagaccagtcaacttacaacaacaacaacaaaaacccaaactaaaaaaacaccccaaaacaataataaagttaaattccagatggttttcaggatagtaaagatttatatcattacacacctccaatttatttaacgtctcagacagacatctttctacaatgtcttaaacatttctttaaaaaaagctgaacatactttagaccctttctggataagattcaattagaaacaaccactgttttgctgtgctgtaaccctctgtcagatgtcaa

SEQ ID NO: 95 - DNA, 1495 bp, Homo sapiens
gctgtaaccctctgtcagatgtcaaaatctgttgttgactctttcaacggcctaggggctatgcttttggagaatgtgtttccatttttgaactgtttctttccttgctactatcaggaaacccacctctagcagcaactctctttccaattttctgctttcaatttccaatggggaggcgggtagaactgtgcttacagaagagcaaggtcctaggaaatctcctatgaataaagttcatggttttgtgaaatttatcttggttactcagttttttgttgttgtttcttttgcaattctcagctgtttctctagcaagaacttatttaagagctttcttctggggcagaatttctattaatgtacagaaataggctgtttttaaagacatttttgtctcaatgtgttttcacacctgtacttaagagaatgttaatcatcatctgaatgaagaactgactaggagtgaattccatcttgtagctatcataagcactccaaaaggtctcgacatgctatacaaagtatttactgtctgagaactacccaagtatactggagtcatcagggaaacccaatgttctctacagcctaccacaagctactggacagggcttcacagattcgttccttgaaaaccactaatgcaatctgcgcacaacaataccatacaggagcttcccctcacccccaaaagtaatgcataactagggtcatagtaaaatcaaaatgcttttattatggtcaaaatcagagccattgagtcctaacagcttaaactagatatagaaagcagggcaagtagtgtaaaacctccacattttctaggcccttcttcatatagcagtttgattatacttcaatttggtgttaagaggacaataatacaaagtaaatgtccacaaaggaccaaaacaccaaattttccatgtccaacaactctctataattaatctactatgtagctagtgtccacgccaaatgttcagttcttaacattcgccaagaaggaatgggaagaaacagatgagtgacttcagatagggagtacactttctcttcctagtctccatcgaacaatctcacttttttaactgagaatcccccacagctacatccaagttaagagcaaaatacttacacaaaaccaaaagacaaattactgtaatattatagttatcatttctattccattaacatagataatcaagaggtgactgtatagagctattaaatgcaatcattcttgtttactgcccgtgaaaaaattgctgcattaacattaagatccatgattgattccgttcattgtttaaactgaaatgttctttatcatttgaaaaccttgccatccattacacttgtgaaacaacatgtttaggccagggaaaaacatgtattgatgcacataaaaattgtatgcattgtgaaatgcatacatacacacactttgtcagaattctttttcagataccatgaaatatgcatggcacat

SEQ ID NO: 96 - DNA, 1292 bp, Homo sapiens
cagataccatgaaatatgcatggcacataaaacttgatatgcttatgaagtacatattatgcagaaacaatgaaaaatttagacaaacaaaacctatcaagctaagcaatatgcttatcaagatagacattcatttgatagctacaagctttcagttccagcttgactacagggtgagagggcttttttgaagttacattaatagaaggcacttgttatttatgaatacagcaaacaaaaaccaggtattaaaaactttacagccattctgggttgtataaattctcaccaacactacattccaatgtagtatttgacttttggattttttatctttagtaagtcatttttataattattggcattttttggtgcttaaacttttttgaatgaaatttaagatgattctaaactaaaagatttgaagtgtatcatccaattttgatatcttaggctgatcacttaaatgaaacatgctaagtttcagaaatcctatctcttatactaaggattagaaatgcacttctcgttgtacatatctagtctgatacttcaaattaatttcattcaaccttcactctgcatttctttgaggtgacattaaaacgtttttctctttttcactgtagagaaatgagtcttagttagaaggtcaactactaaatccaaaagacaaataactatgggtagcgattcaaactggtgtaccagccaaaagctttccagccctgaaaaagccaggtctgaaagaccagcctctactagaaactcaatccttgagactaatgccaatcaccttataaaaatgaaaaatactctttatgtcaaaaaggatatttttaccttaagaaattctgtttgtttacatacagtataagcatcaagtgctcaaggctttaaccctaccaaccaccaaacagaatggatttttcttttcttctatatacattccagatctcactatttattttttcagtgtgagatgctacaacgaatgttgaaaatactcaaaaagctaggttaaaaaattttttttaaatggctgtgcttatgattcaaaaagacctaattctgaaggcatttctggtcaattccagttgtttgccggatgctgtaatagttgattctcctaccgtgacccggctgttggtgcccgggttccctcccagcctgtagttgttgtaggcgagatgactgtatggattgtatcccacaaaccctggtgtgctgggcatttgctgatggaaacaaatgagacaaaaacacgaatgagaaatgagctcaaacgagga

SEQ ID NO: 97 - DNA, 1360 bp, Homo sapiens
cacgaatgagaaatgagctcaaacgaggaaaacacagaaatgaaaaatgatctgcatatggcatgcaaaagcaacctgaatttaaacaagcaatgatgtgttgtaattgttctttttttccactgaggaaattaaatatttttctttcattgagaaacctgtctgcagtgtcttttggttgtttttctctttcttttttgcaggggctgggggtgtttgtgtgactgtgaatgtgtgttttgttttttgaggtaagcaacacactgaagtgtttaaaacattcaggattactttatggtcaacaataggataaaacaacttagcaatatatgaagactgaaataggaaggcttgaagtgtgatcaactagaactctgaaaacactacatgcaaaacaaaatacaatttatttgacatgtggatgccaccaatgtatttatctactaaaaacaaaaaaaagaaatggatctgatttcaacgacagttttaaatcattttatataatgtgagaaatgagtagagactcaaatcgggaagccaggatttgtcaattgaaaagaacatatgttggatttgatggatgtcacatacatgatttaaaacaaagacttgtaagaaatgcatggatttcattctggggtactatctgatctttttaacccagtcattcttttataggatttctcttccatttcttctttgatccatcttccactggtcaatcatgaaaacatttctgcattttgtctcaatgtgaactacttttctagtttatagacttcttttttcatctagtttcctgatagctctcaccctttcaaaatacaactgctcatttcagcaacagaacccttggtttttgtgaattatgtgttgatgtaatcacaaatgggctcttatatagcagtagccttggggctaatacaatgacactcaatgttcatgagaaccaaggcataatgcatagaaagaatatagtagagagagaccaaaattagggtattttaccttgtaaaattcaatcaaaatatgtgacaatttcatttttacatgcaattaacaatatcggtccttaattgtataatgtaaaatacacttaacacattccaactaagctgtagctgttacaaaataaacacaatttcctaaaacatgccgctgcacatatccttagtacccaaaagaaagacatttaagcagatattacatttgatactctttaggagaaaagagaacggctgatcaatttctagtctatacagttagaaaagacgcaaataaagcatatttaagtaggcaaaacacagttgaagtatcaaaggcatgaaagaagtgtatattacttgcagcggtacatttg

SEQ ID NO: 98 - DNA, 1845 bp, Homo sapiens
agaagtaatggaaagaaaaaaggaagaagaataattcatttagtatccattctgttggatgttttaatccctagtcttctatattttgtgtgttaatgtgaaactataatgacacaaaaatataactaaagaaaggcaaaaaaaattcctttttatgcataataaattataaggggacacttggtttttgaaatattttaatctcaaaaaatcaagtttgtcaagatgatgcattgtcagaggcagtatttttgtcaaaatgacaccttcaaaggtagcataaataataagaatcactgttcaacattatgaggcaataatgttataaaaataagggaactaaaaaaaaaaaaatggaaagcaaaacattataattataccatttccaaagctgaagtacatggttagctctttgaggtcagaatctcaattgttcagctccacctgtatagccactagcagaatgccatggagatggtcataacaaatgttcttcgatttaagaaagaaaacaaagcaagcataggactttatagtctactggaattaactttagagcctgtatatgacataaattgaaatgagaacatatggtacggtatctcttttctaaagtatctcactaaagaaaaacaaattgttgataaatgtaactaaaatatgtatctgagggttagtaaatatgagtagttttttagcggagaaaactaagttacacaaggacctaattagtagtgaaaagtagactagcctgaaatttaggtggtgggggtatggaaggaaggattaatattaaagaactaattttgtagaatttggtcatgctaacagtgtttttttaaaaacaaacaaaaccccccctcccaaaaaaccaacaaggaagccatttcagcaagacctgaacagttactgctaaatctgttttgtgggttggaaaattattttacatgctgaccaagctgggccagagcttcctgggtgaaaaaacacgttcacaactacttaaaacatatatacttccaaaccaataaaatataatttatggagtggaataagattcaatagcaagatctgccccatagataatgaaatctttacttgaacagcttgaaaatatttacaatgagtagtttcagaagctttattgtttaatatgaaaattttagagagagacaagaaaggagagaaaaacataaccagttgaaggttaggtttaacaaaatagccagaatgagcattcactcagtaacaacttaaagactcttaatagtgaagattaataagaaagaaatggtaaaactttcacttatttcccatttacaaagaaaaaacaaaacaaactgagcacaggaggttggagttttacagtactgtttctttaaatgttggggttggttcaaggaaagatgcaaataattattttatttagtaggaagtgcttttttttttttcttttaagctgaatttcatcctgttgctgtgatgattgagtgactgtcactggaagacatctgggtttttgtatcaaggccagagttggctattacattaacaagaaaattaaaacttactgttgcaggagctggggtgggaggtggggcataagatggtctttctgtttgaaagaaaataaataacttcttgtaaacaactgagatataatactatgcaacaaaactaccaatggtcctgttttgaagaaaaaaaaatgagagtattttggaattcccacttgctagggcattagtctcttattaacatagattgataaatataaaaattgaaacttacttgacattttggaagattaagttctcagttccttaagaatgaatctgagacact

SEQ ID NO: 99 - DNA, 508 bp, Homo sapiens
ctcagcaagcatacgagaatgttttcctaatgaatagggtaatttaattggtatttctgagtaaaattacttcaccttaattcctagtaattaagccttttgtgtattttaactagttcttataggtcatttggttgattagaattaaatgactaaaataaagtactggggatatttagaaatgtactttcaggttttttcttgtgatactaagctacctcttgtatggaaaacattttgctgacgccatgtaaacatttcatcagactgatacaaggatgagaatagaaagtgatgtattatcagggtccaacgcaacaaggcctaccagatactgacagctccctgatcagcaactgtatcatgcttttgggataacaatttttattaaaattaggcagcattttattcctggaagcagtgcaaaaggtaattggtatgacaatgaacttcacattctcttataatggtaaatagcttcataaatgctgggaataaattttgagag

SEQ ID NO: 100 - DNA, 469 bp, Homo sapiens
aggacctagctcaattcttaggaaattttttcctagtattaccagctcacaacataaccaggcacatgtgagcttgttctttacatcaacatacatcacaaatagtgaggtacaaaaagacaaaaattcatctttggaaagaaggcaaataaacttctatgactattggaggtatttgcaaccaaacatgtggaatagatctgatttttcgcttctattattaattttaaggaaattccctggagcataaggaatgagtcctggtgtggaaagaaacagctcattttctcaatggtccaacctgagtctttccctcttaaagaacagccagaaacctttgactctggtgtagatttcctttctgctcacattaagggagctgtcaacatccagcaggcctcgctgcaggggaccctgacaactaacataagctccctgtacgttatacttcattgttaatactttaaaa

SEQ ID NO: 101 - DNA, 1173 bp, Homo sapiens
tgaaccaatgggggaaccttctgcccgggtggggggtgaaccacggacctgccttgcccacggcttcctgaggtcgctctctttgtcttggagaatgtactttactagcaactcccctaaaacggggtattcacaggtgctttgaccaatttcgggggactggccttgcctccaaggagggggccccagatgggactccctcccaaccctcgctctgctaggcctcaaggaggcctcaaccggctcctggctctggccccacggccaaggctgaaccccagcaacccccgggaactcggggtctagccaagcggggacaccacgacttgcacccaccgacccggtccgtcccacttggaaacactcacccgcgggcagaaaaagcgcccgcagctccggcttcgcttccctttgtcccgcgctcgccccgcccctcgcgtccggagcttccgcactcgcactttccacactcttcttaatttttttttttttccgggccccacccgaccctctttagaaaaactaaccttctagtgaagatgcggtgatgcttagcacactcagggatttttttcaggacccattggatcctcaaaactccccgaattttgatactttcccagccgggcgctgattcgtcacggcgaagagggccgaggaggcccgacctaacacagaataggcctgggtttagcggctgtgaggagccggagccgccgcagcgaccgaggaagtggcgggaggtgccgagccttgcggaggggcggtgggggccgcggtgggagacggcggatggcgctcagcgcgaggccgcggaaccactgtggcagcaagcagttcggccagactcccgctgagcccgctcctggaggggccctccccgactccggtcttgctttcctttaggctgtgggtcagagtctacacttcactaaacctgggatggaggcgtggaggacttgcttcgcggcgtttgcgtcctcgcaggcgcctcgcagggcttcctgccctcacggcgggggagtagctttggcgaaaatcagcacgagttctgcagtttttccaagcgcttttagggtgtaatcgtcccaggtttctaagccaaggcccggagagttgaccccctcgcaacagcttgtgtgtccttgcagcgccgcgggtgccacctggtct

SEQ ID NO: 102 - DNA, 445 bp, Homo sapiens
ggcagccctctgtgccactccagggctctttccactaaatcatgagtatgttggtttaccagatggaatgagtagcctcttctttggatacataaacacccgatggatattgtgggtcactgtggagggagaatgaacgtatgggatccctgacctgtggttactggaaaacagttgacatttagagagaggctgaattcttgggcttcccgtagcccccatcctgagtgtgccaacagggactagaagcatctctagtctgcaaagcgaggaacaagtgatactctgtccaatttttccaatattgttatactcatgaatagagattaatgaaattgaagagcatattcaagagaaagactaaaggagaagtcgtctgccccgtggacaggcagcttgagtggtgcttgagaaaatgtacatgaaattgcttgttaaaaaatat

SEQ ID NO: 103 - DNA, 322 bp, Homo sapiens
ccatcagagacatgtaaaggattaaagtacgatacacaaaggcctcagaagggatttcagtacattctttttctggcttcgtccagcaactccagcctggtttcttccctgcctttgggattatggtgggaggattgggcgagtgcagtgctggggaggcgctgtgtgttgtctctaggcagtcctctgaagaaaaactgcaggttttggatgttaagaataaagcaccctatagtaggaaaggggtggcccaaaaacggcaaaaagggaaaggaggggacctaagtggagcagtgacattgtctgatacactttctcactg

SEQ ID NO: 104 - DNA, 1224 bp, Homo sapiens
ggatataggcaagagataatagaaaaataatctgttctctagtcctgaagaaactaaaactgaagagtgaattatccagcaagatggactttacttattatgagtttttttcccccaaagcaaacaccagaacatatgctcttgcctttagaaggatatttatggtaactacaggacagatgtttggagttgtgattattcccagaaaatttgggatacagcatcaatatgactatttaaactaaatataactataagggtagttgggagcactcacgtgggaccagtggttaaccccagagataatcttaggcccaattaagacctaacttaggccttagttttcattctggcagcaagatccagaaacgtggcctgctttcccctctgacactactcatacttttttggggttcttctttccccaagacagggaagccaaaactaagtaagctaaggttctagtccaggtgtctttgagttctttccattgttctgtgggaagaaacgggtgatggagacagagttaggggtaggactgggaagaaaggagaaaaaaggagaaaataagacagaataaggaaaaacctgaagtccttggacacccagtagtccatgaataggctctaagtgatctatgaaccctttaaaattatactcaatttttatgggcttttttcctgataggttaattctttcatgagattttcaaagaggtgcgtgactcaagaaagattatgaaccaaccactgagccatggagtttgtagtatgttcttttgaagcttttataatggattttttttttcttaaacaagggaaagcgagagcaaagctttacttgacccaaatagcctatgaaagtctgattatagacaacatgatgaaacaaactaattttctcagctgtttctgtgagagcagaaggagttatgggtattctgttttctgtagctggaaatagttgtgaaatattgaagtttagcagctttccaggacagagtgatccacactgttttacagaatttaaaaagcacggtttgctttgagaaccctctatgttgccctcaaaataacctggaggatttgggacatgagtgttgccccatggtgtggaaaaggatgaacgttgaaaacagggtagagctggagaatctgggttgtggggtctattatccactgataatattgggagtctagggcacagtagccaaacgagattgtt

SEQ ID NO: 105 - DNA, 577 bp, Homo sapiens
atgtttcatttttttaattgtagtggaatcattaccttggtaaattcatatcccaatttaaaatgccccaaagcaaataaagcttcattataaattcaaatactgtattttaaaatctacatgttatacacccaatagatgcatactggaattgctacaacaagcagttacattcatgacgaccagtactaagttttttttaacactgcaatagattatgctagatatattgctttattatgatcactgttgcttagtacagtaactttagtacaatagcttatatgattgcatttttaaagctttaataaagttagtagcatttagcaatatcaaatgaaacattttttatgtataggatgtattttaggtcagatgcttatgcaagaataagcacttaacatgctgttatatccttgacaaaacaaaatcatcccttttcactaaatagaataaaccagactaaaaggaatctgaagtaattgaaagaaaattaaaaattttatatccctgtattatgttaaagattatttaacataatattttcctggttaaaacatacatttttctggttgaa

SEQ ID NO: 106 - DNA, 1802 bp, Homo sapiens
aatattttaaaggctgtactaaaatgctaacgtagctatagcccttagatgatactttagctgggaaaaagtatggtgagttgtactcagctactttttctgcttagaaaagaattaagaacttataaatttctaatgtcttaaaacaggtatttattaagatcttaaatatacctgtattaaacaaattaggttattttaaaaactttgcaacaatacctcacttattcacaaatatattttctacccatatttattacaatttgaacgatttaaaaacaaatcctctaaatactcttagcttagataacaataccgttatcttagttcacataaatgattgcaagaaatatttataatacttcatatagtatcttatctacggcttatagcaaacaatctaatcacatttagctttacagttggaaaaactgggatggtgggtaactgttctgataactatagtaactaccttttcaatttgcttttcatgttttgtttgcgcagttggccttctgattttttttctttttttggtgggggatacaacctttaaagttccttgagtaaagtaaatcttccggaaatcagatacttattacaaaaaaaaccttttagatatatgtagattaacttaattgtacttatctcaaattagccctggggtgtgttctatagtttgctcagaatttctcatggaaaataactcatttttctcagtatacaaatgatttatctcaaaaagaagaatcctcattaggtgaatagtgagtccccctttaaaaacttgtttataattgctctttttgaaaaatagaacaaacattgtaggtttaaccagtcatggaataatggtgaataactcagtgtgactcttaacacaatcctattcaaacaattcttttttccttagcgtattcagccattgaaaaaaattacaaagactttactaaaccaggttaatgcttacagtctctgatgaagtttcaagggaaaaagaagactattgggagaatataaagaaagagactgtactggatttgtgattttatttttaagctactccctctcattcatatatatatatatatgtctatctccataattagattcagagaaatgtcctttattgtttttttcttctgaagagaaccacatattgatcataacattttccatacatacgtaataacttacattttgggacagagggagttggtatggcccaccttggtccatcctaacattttccaatcaagtcaaatactatctttggattaattagctgttgatggaggtttgatagagggaatactgcatgatcttctcatgataagcctgacttctatatctggtagattatcctgcttagtctctaaacacccttcatcagtggctgctaaatgaagatcaaatcgaagagaaacagactttttcctcaatcgagggttatctttaaagaaagaaccttcccattctttaataacttcatccactttctctgtcctgaaatgataaaataaaccttttaataatgaagaagtatgggtctattaaaaatatgtattatatatttcatatctatggaaaaatcaagaaatttgtataatttatagtgtatagaatttataatgtacatactttaaaaatcatatgaatagaatttcaaaggaattgtatggaatttctctttaggaattctcatgtttgggttgtatttttggaaaaaaacggcaaagtaaggattcagtactcttccatgagtttttatgtatatatgtcagattaaaaatcacagtata

SEQ ID NO: 107 - DNA, 582 bp, Homo sapiens
tcacagtatactaaaactatgtttggaaacatttaaacaaagaagagtaattactgggattacgcaaagttaatttctttacatatatttattattatttcttagtcaaagtttctttacttactgaatagtgccatgagcttcagtgctctccttaacgatactcccatttaagattgcctgtttggttactgtttctacattttcattctcatacttttgtgggacttttgtagtaaaagatatttcatttataatggctgtgaaaatatcatttatgatatattaaattacagtattgaattactgttcacaaattatattcaaacttttattcaaatattgcttgttttttttcgactttaaagtatttaatttccttataaagtaatccctgtaaatagtacatcacttttcaaatgagtttatttatgtcagaaactcacctgatggtaaaacaaaaccaactctacttgtggtaggctttttgtcttttttcccaccttggatacaaccataatatctgaaatcagaaagaattttattttaagagcaacactgtatcagcaaataattaaaaca

SEQ ID NO: 108 - DNA, 510 bp, Homo sapiens
tatttttgattcagtttatgttttttcaaagatttaataaatgtcaagatttattataggctaaagttgtttcacctagttttcatctagttttatagaggacttagaatttggaagcaagcaagaataaagattttttcatggagaattggaggttatgtcatgctcaaagcaatatgaccttataagtcattacagattatgatgtatgaattaacaagaattcctcttttgatatcttttcctatcaggatatctggtagtcttttaaatcatgactcaaaataatattgctttccgtggttgtaatataattacgttagagtaatgattactgttttgaggtttgatgtgtggtatagggtgagcccttgatcagggggattgtggtgattgtgaattttccaggcttttgttatgggtgatccttagaaggcacagactaatcctagaagagatgaatggcaaggaaagtgagaaagttaggaaaggtctctctctctctctctc

SEQ ID NO: 109 - DNA, 561 bp, Homo sapiens
aagactacaagatcatttttgtagtaatctagaattgtttacattttgttctaggtgactttggctgtttggttcctaattttggaagactagaaatggttctttcatatattctttgcagtgcataccttattgtatgggctcagtgagtacaccatgatgatgatggggtttttggatttaatttctctgactacatcaacaatggcataagtggctctgtatttctggccccttgtcattaactaaatggatttaggtacctgatttcttctttttctaggaggtggcgataagttgctatttcttgttccagcctcatcttcgtgttgagaagcatctcgtgctcttgaagctgcttttcgatgccgcgccttacttcctgtagctctttttctagtccttcaatcacagtctctaggtcttgcagctgcatctggtaatgctgctcgctggcatgtagggagttttcaaggcccctttcctgttttatatagattttcatcagtgaatcagtaacacagaatgtgtttctgaaatctgatttgcaatatcttcatc

SEQ ID NO: 110 - DNA, 689 bp, Homo sapiens
agcctaaatattttttattcgacgtctcaatggcatggataaaagaatctccactgttaagactttggataataacgaatgctctattccctatcttcagcaactagaaaatcccaaggtaataagaaaggatttcttcatttttacaggtctgaactaaaccttgagtgagttggtaacagccactgccacaatggagggaggggtgagtaattaaactaggatcagggatagaattcagtggccttgatttccagtttctcatggtaaataaacagacattcatcttttccttctcttaatcaaatcacatctgaggactcgatgggtcggttacttttgggatcattctcaccacagcatggagagattcaatttccacttgcaggtggtgccactggcgtcgggcctccttgagttctgcttgagctgccttcaaagcctcttcatctttgtccatttttttgcttatgtcttcttctagctaacaagaaagccaacagcaacaataacaaacaaaaaacaaggagtgcttctgaaaatgagatgtgtaaaagcaattatagaaaaattgtataggaatcaaagcatttttccttaactcattagattataatgtgtgtcctagtgcctagttaactaattaaatatgtaagtccattgcgttcttagcccgttttctcctatgt

SEQ ID NO: 111 - DNA, 583 bp, Homo sapiens
aatatggaaaaatacatttacatgaatgaaaacagtttgcaggaccaagattcgtgatctctgatttttaacttttcattatttatggatcactaggaggaaggattgaaaattagctatttccccccacattttcttgtaggctgctttgcagaagcagataaacagccgtacccccaaaactgatcaattctgggaccaggtatagggatagggcgtaaatactgctaggaaatacattactagtaatttagagaattaagttgttataggcaataaggctcacaaatagacttccatattaagaaaatctgttgattgacctttttcaagatgatctttttaaaaggcatattaattttgggtatctgggtaataaaatgaataaataataaaaatgacttctctaaggattgttttctaaatattctcctattaaaaaagtagaatattttatatttagctttaaatgtttttatgttgatgttgaaatgaaaagaaagtatctgttgacagaatttttaacatttggccccaggaacagtgagaacaatgtatagaattgattgtagcattttgaagc

SEQ ID NO: 112 - DNA, 506 bp, Homo sapiens
gtcatgccccaagacgattgaggtcccagatgagttttggggtgttatacaacaatctgtaactaaaatagcttatttagaaatttaaaaaaataactaatcaggctgtcttgaatttatttcagctgactttctgagttatttggaagaaaatcctctaaagtagtttcaaattaaaagacactttaaacaaaactcaccgtagtcttgctttttcatttgaatttactcattttggccctgtgacttgtaaactaaactcatatttctactactgcaaagttaagtgttttgtttatgatttttagaagttgtcatctattgatttttttcttctgtttgtaaaggtgaatgaactatcccaatgcttacctgtaccagtgactttgcttaatctaagatgttgatcattctttatgaaggctgaaaatgttatctagaggtgaaatttacaatggaactaaaaatgagtggctaatggaataaaggcctgacatttttctacc

SEQ ID NO: 113 - DNA, 1343 bp, Homo sapiens
gggtgatattcttaagtaaactttttgctgtatttcagggtttggaagataacttgaacccatatatgataggtaaactaaaaaatcccctaaatttcttaatctttgtttctaaaatatttgtttgtaaatttgtttaaagacttgagaccttaattacttgctgaaggtgattgttactttaaaactaagtctatgaaattaggatttagtccttatctaagtaggctctctttctcttttttaaatacttaaatattacaagctttgtaatggaaagaaatgtttctcatcttatagtacagaagcaaaaatcttagtggagaatcgttaccaatttggggaatttcaatggtcataatttatatcattgtttctgaatgccatgttcacacactcagatgatttctatttataacaatctggtataaaatggaactcgttaaaaagatgatagaaaccttttagaaatatctctagaaagtgtacatgctaataaatcttacttaaagatttttcattttaaagatgttatttaaattatctctgtaaataactccaataatatctttgaagggtatttggaatggttccttcctgaagattgtaagaggttagagtgcaccattttatggtatgttgaccccatgttaatgataggaacctcacaatttatataaaaatcaaatgcatcaatcaacacttacttaatggcaatttaacaatataatcacagtatttccccctgtagtcccagtcacactgcagtagaagctaaattccttccccaatagatgctgcatcgaaaaggaaatactgtacctcagagaggccgggacaggaattgggtagacatggactgtctccttattctggaaggtgcctgtctgtatgaaatcattacctggatccttgttgagagcaccgtctctatctgatttctggtgaggatcttttcatagtttgccctgatctcattgagtagctgggacagttccattcttttcccatcctccaccttggctaactgaaccttatcgataggatgagtcgctgcggcagtctgctcggtctgcgcggaaggcagggagcctcgcagagttttaaagatgcagagctcctttttcggaggccacggaaattctcatctttctaactaattatgcaaatacagggtaaactctttgctcctattgttattggtatagtagaaatgtcagattcttcatgaaggaaaggaaaatttcaaaaacctgtactggttccctgtaaaaattgagcactttgaggggagggggagttcatttttgtgaaaaggaaatggggcataacataagaaaatt

SEQ ID NO: 114 - DNA, 661 bp, Homo sapiens
cccctgcatatctgcctctgcgttctctctctccccttctaaattcctggtttaatcttgccagctggttgctagatgtgacagaaatatgtcgtgagagtggatctatcattattgttatttgtggagtggctttggctgaattgtatctggagcacagttcaggagataatcagacctgggttctagcccttacagggcctttgcatgcatgtcctgctcttttaatttctgaattaactcacatctggccaggccagtctatgctgggcattctcacagccctctccaaacaaagctgtcctacccacagctcctggtgagaggagaggttccaggttatttctgacccacccctccctacctcctgcaccttccccatcagtcacaacttgattatctatagattggtcagagacctttggagtaggctgagacagaaagctctgactaaagagagtcattaatgattatctaggccaaactgattctctttcttggtaactgggactgagaaatatgaagagaattaggcttgggagtggaggagagagaagaaagcaatgaattaaattcctaaattaaattcagggagcaatgaattaaatgcttcctgctactttaggtagctcctgctaatatccgcctgaaacacagagag

SEQ ID NO: 115 - DNA, 1765 bp, Homo sapiens
cgtttctttaggacattttgtgtgggccctgagtcctcttcattctaagactagactgaaggaacacattgcttttgtttcatcctcccctgagacaatgagcacagattaatttatttgcctgaagaaggtaaaggaaatgaattaccagaaggatggtaagtggctcaaaaacactatagtccccaaatttgtagtgtttacaaacacaagcaaatcagacaggcacccatcattcatcttggtgaatttttatggagtgatttcctgggagtttggaattaaactctgggagaaataacatcttttctaacctgtttgtccttaacaaatgtggcacactcaagaatttgagttttgctttgaagaggaaaaaatattaaaaaggaaaataatggattatttttatgtaatgcatttgggcacatacatttcaccctgtaaatcaatcttgtacacaaggatgtcaaactcaagccatttaatgtttttcctgtcctgcacataaatgttgtgatctgtttttattctaaaaagtataaaagatagaatgatggcaatgtaagtttatattaagtgtttttttccttccaggaagttgtaaatatgaatctgttttcttcagctagacagaacactccaattgatcttttataatcccaaagagcttgggtattattttatttatgaagcataatttctttagcagcttaggattttgtgactccctcttcttaatcaagcatgcattttcataggattataaaggcataattagtcagcaaataaaggcttttttttaaaacttaaaaaattgctataaatgacagggctttactggcttatatcctttttgttatattattgatttttctactcataggagcaggcctctacgtgatatcatttaatcttttgttttatatataagttaagactataattagacgataaagagttttgtgtgggaatatgtttgtcagcattttttagcatgttttcagagtatgtgagagatgcttacatgcctttctatacacactgaacatgcatttcacatgaactgattaagcagagtacattatacatgcaatcttagtcctggcagatgctcacttcattctttgctgctgtaactcaagggcaaaaagcagggcagttttgccaatcaaggactttgccattgggtcctattttctctggcatcttccagatacttccaggtgcttctccttcttaccttgttttttgaggcccaatacacacagatggtcaaaatgagctttactagatagagggtgagctcattttagaacacccagtttatacaattttggtgtattacaattcatgatttttttctagcttagcagactataggcatcttccaaaactattcagaattttctccattccttttttatctggagtgcgttaagtcccaatctttgaagtcatagttgtaggttgaaactgtgctcccatctactcacttgagctacaatatttacgtctcctttcaaatctctagaagggaggtctttgttgggttctaagtacattgtcttcaccaatttgacaggtgttcccttagctcttcctgtctttgaaatattgatttttctaaacctgctttctataacttacgacattggccctgctgtcttctattctgtgtcctgatactctagtcttagtcatttctctgcatcttagtttattctagacaatttatttccttgcacttgcatttatcctttcttgc

SEQ ID NO: 116 - DNA, 1021 bp, Homo sapiens
aaaaaaattgttttttggagggtacattttagcacatttgggaagacatttatatggtagactttgaacccttatgggggatggtgtggagtgttttctgggaaacagaattagtaaagtggaagaggcaggaaatagaaaacttaaggggtggccgatgacagaggaagcaagagtttacagaaatccctcctcctggctttcaacgcccaccctacctgagcaagcttgtgtctcagtgtgaagtttctctgacaacagggactggtccctgtccagtcttggatatatgccctgcacaactcttgtaatagtaacagtctagtcctcagaatcaaacatttagtttaactttacgtgtttgaaatgccttgaatgcaggaccccgctttagttttccattttcacccactctggtagcctccctagaaagactgcgtggacagcttgaggacacctgtgcagatcatgatcaaagggaccacgtagttctagtttttaaataaagttcacgtatctttttgtattatttttgctaattatttgcctttacccaacggcttgaatgattgaactctattttcaggcttaaatattccctctgcactgctgcaactggccggataaatgtgcctactccagcagcaagctctccacatcccgtccccctttctgtctcctccttacttcatgcccccactgcctccttagttttcagctgccagtgcaaagcaccccagctttctctaggctgtgctctgctccctgacagctgctgttctctccccatccctctcttcttcccttgctttcaacttcccagccagtctgagtatttgagcaccttccagctgcttcactgttgtgtcatgccgggggccatgttgcacagccgcggcacacatgtatatccacggggactcctttctgagcctactgggtgcatagaaactggtgttccagaagtgtacagttgagtttttgacaaagagaaattttacaaacaaaattgtggctgtac

SEQ ID NO: 117 - DNA, 740 bp, Homo sapiens
cccattggcttcacagaagagatagcacctgaccttggctattaaatgcacagtatttaaaatatatggattaacaaaattttatttgctcacacctttaagtggggttaaatatacttggtaattgttttcttcttaaccagattgtccttaagggcaaagagtgcgtgtcttacatttctttaaaatttgccccatttccgtcgtcccaccagccccttagacttagtgcttaatgtttttaaacaaacaaatgaatattaaagtaggcaatcttttattgactttgtatcttgtcttgaaaaggagttgattactgttaaaattctcttaaaaatatgttttgagttctgggaatatacattgcaaggttcaagtttgttttgactttctaattgtataattagagaggagtagctcactcaggaattactgttgtgaatgataagcttttcctcttggatgtgaggttgtgttcagattaaagacactaatatggtataccagcaattacacagtttaaggcaactaagttacatctatagaccatatcattttacatgaatataatacttctatttccataaataattccgaatgcttggagaaaacactagtttttattccccaaaatcattgtctttgaaacctccttaaatagccataagactagcaactcatgccttgaaaaaggtagtcactgatatcaacactgtttgagaattggaaaaacatttcca

SEQ ID NO: 118 - DNA, 805 bp, Homo sapiens
ttaatttccagttctctttgataaattctcagtgttaacgactaagacagaatccatccttttttcaactgtatggttctatatgatacctttgatagttaagctatattagtttattaccatacatttggatagttagcaatcaataagttttgtgctatctgtgaaaaataatctggtagtaagataaaagtgtgcataacttattttctgcttcagtacttaacatagttactattttcttgaagactgtagttttgtaatactatgctctttggtgagacaaagcgttctgaaatttgtgaacacttcttatttcctggtaattattttttttggcccccccagtttgacttttctttctttttggcttcttatatcactgtcccacgttaaaaaatttaacagattttaagatgtcttttggcttaaattgcaaacaattacatttgaaaattaatgaacttcgcgaaatttagtccagcctatatgaaaaagaaaactgttgtcagggtgagaatagatgattcgtgatttcagattctgccacacctttacaaatatttttcacactgttgccttcagaaaaattcattatgctaatccatcaagcttcagttccttcttaattgtttttttcaaacgtctcttctcactggtggcttggcgccatctctcactgctgacttcagaaatgaaatgtgatgatatgctgacataccagtgtcacaagctttgttacctttgaaaatcattatctttgaaacttctgcaagtagccacaaaacgagtgactcataccttt

SEQ ID NO: 119 - DNA, 532 bp, Homo sapiens
tgtgcctcatacctcaaaagagatggtcattgaagtcagtactgtttcagaattaggaaaacattttcagttgtctttgagaaatcctaagtgtcaatcttagagcttgaggaaacaaacaaacaacaaccagaattcaccactttttcaactgtgtgctttttctttgatacctctgataatttagctatgttaccttattactgtacttgcatgttgtaaatgatcaatacatggtttttaaattgagtagggtatctacaagacacacttaactgcataatttgtgtctaaatatgtcatgtatgtattttttttgtgtgactcacttatagaaaggacttccctgttgtggttcttcggttgagataattaacacctcaaaatatcatatatagttctgaatttctagagttttattagttgtaaagtgattttagaaatgcactctgattctaaatgtttgtcatgtggatagaaattttgctatgaataatacattttcattaaaataaagacgtgtttttcatgc

SEQ ID NO: 120 - DNA, 933 bp, Homo sapiens
gttttttactggcctctttggcccatattgaattattatctgtgagttcccaggcacttatcatctgtgctacttactacttttagttctatgtgacattctgatgccattgaattatttcaagagtatctcccacatctccagatgggctgtaccttctagaagggaatatttgtctcttattgtttactgtctggagtctggagtgcttagccaagcactggacccaaattgattgcttcagaccagagctaaaaactgcaaggttagaccttctgaattagaagtgtactcatttttgttaagtccacaaagattaaaaaattccaaaatgtagatgggtgcattcacatgacattactgaagatgagcaaaaacattccctaaatatcctgctggcttttatttttcctagtgtaaaaagatgagtattgttgaaatacattcccttgtcttcatggcttttgcaaagtttcactctatacattgcttcagttatccaatatacgtgaccaaggttaaatggttcttggtgctttatttgtcttagtttttgtggctagcttgtgtggtgctccttaaactggtctttggtgaacacctcttatttgtgataaaacaacaatgccatcaatcagttctttaacaattgtgttgtgccaaaacatttcgttggttctgcgaaaagaaagtgttaggtcaattacatattgatggaaataaagtaaattgataaagcatttctctttaatcaaaagtaagacagctttcgtattgggtacttattaacttttctacctactttcaacagtgagaaagataagcatataaatctcattgattttaatctttgcttttctaaagcttcacaaatttggagtgactttgataaaattcagtcagaattgtagttaatactttatgttagctaca

SEQ ID NO: 121 - DNA, 870 bp, Homo sapiens
ccttaaactaacctacaagttgaaaccttcttgtttaattaactttttgtcttcaattatgcatctttcttcagtctatctcctttccttcttcacctcctttgacctttcaaagaaaatatggattaaaatgcatttccaccttttgattttgaggtgaacgatgttgaaggaaagccatttaaatgtgatatagcaatagcttctaagatatttattactgtttatttaggtgtaagttgaaagaaaaaaaattacaatgctattttgacaaatgtctcagtaaaagtattccacaaccagagtcttgattttatgactctaactgggtaatacaaacattggattcatataaaaacaacacttttagactttggagtacgctgttcctctgaagaaaatgaaatagaataatagaaaacttgtatttagaacttatccttgattttatttcctctttttgatccagtttcaaacttatgactgaaaagaaaaataggatagtcttatactctggttttgattgttgtaggtatcataaaaattgtaatatctgagatttttttttttaaaaagctctatgttgaagtctttgaattttagctttttctatgttttattcgttctgtttttgaattacaccaccctaaatgactatttatcatctaatatgttggatataatacacttgtttccacagacggtctggcagaacaacagttctgcctaaatttcaattcaggtgggcaaacatttgtggtgcaccttgtagccggtggtaatgcatggactaggggctgggttcataaatcgaggccgtggtcattgctttcctagagctggaatggggcattgaaaattgtccttact

SEQ ID NO: 122 - DNA, 658 bp, Homo sapiens
ttatccttactgaatgaaccctgtggaggttgttcagccctggttgtatgtccttgttgcggttagctaaaaatgtaaataggagtcattgagacctatacgtgccccagtcctaactactctccttctttaccatacccacagcttcttgcagaccagctcagccctgtgagcaggcagtggttggtcccagcttcattcaccaggcacgccttgaccttcagcagctgcatttagcctggctctggtccttggtcttgcaatgcccttgaaggagctgggtctccaggcactaacctctacctgaggctggcgcttggcctttgattccatcagcttggctttgagggctgttttctgagagtggagcgaagattgcctaagagaagagatgaaataaagagtcatttgggtagattagcatcagaaagttttcctattctctctgcaggaagggaatatacactggatggatgttactgtctcatcttctaacctcttctctttcaagtaaaacagagataatcttctatgcagatgctgtgttttaagagggcgaggttttgatttaactggaaggaaagtatctcaggatgcctgtcttctgtacctagtgcatccctatggtgtaggaaaatcctgctttcttaaggtagag

SEQ ID NO: 123 - DNA, 510 bp, Homo sapiens
tgttattcaagtttaaatatgttaaatcgtcttaaaaaggagcatatatacttcttgatattcaatgaaatcctagctgacctatacgcaggaattttatctagattaattcttttaagctttcagccaggagccctgcctaatcacctacctggagagagaaacagtgatctcattctgaacgtgggccaacatttccctaacagcaagttcatgctgacatttgtggtatctcagctaattcagtggctgtcgtgtttgcaaaatagggcctgacatgtgcagttaataattttgtttccaggtgtttttcacacattaaatggaaattttcctgtccaagttactaattggaaaagcccaagattttggctttttcttaagaaccctaaaaaaaaccctttttaaagggaatatcatgttttggaaacatattgctgagaatttatgtgaaatcgtgcagttgtctgtgtgggcaattggtttatggtgttttcacccagggaaaga

SEQ ID NO: 124 - DNA, 1268 bp, Homo sapiens
ccactcagggagagatttttatgtaccaagtctactgtagactgtagttcaatctccagggcctacaaggctggctcctgtacattcgtctcagtcttagcagaattggatgcagcagcggcaacctgccgttgcagcattcttttctgaaataccaaaataaaaacagagtcatttatcagtgaagcgaaattgtcctagatttattgaccttggctgtgttttttgtttactttattgttgaatctaatttcagcatcttggtgattgtgattggccatggcttcatagtgcattctcatgtcatgaggagctgtgttagatcagctccaggtgggctgacccattccacctgcaactcagagcctgcaacagctggctggcctttaatttcctgaattggaaacaaccctcgctcaaggaattcggccattatggtaagaaaataacttcatttattagaattttccttcacctcatcagactcaaattgaaggcaggaattatgtaagaaagaggaaagttacgacgtgctgtatgggcacatacctcttcctggttctttttgagatgagtgaactcctccgccgggtttcaatctgcatttctagatcatcttggacaaagtcatgtcattccggacttggtgcagactgttgatgtcagcttgacgctccagcgcagggtcagttcaatctcaaacctggaaaaagtttctaatgctttcagtggtcgttaggtttgtattattaatatcatgctgcattttaaatattttattagaatattatagaaatgccaaacgtctgttccttatttgttgttaatataatttgctattaactttccccatttttggcagtatgatggcactccatataaaatgctgcaagcttcggggaagaaccttttcagcatttttgtttcttagaacagagtgaccataccttgttggcctcttgtgtgttggggtcttctacacacacataaagtagggagttaaattaaagaatcctcagaaacacatgctggttcttttcagaaatctcacttgaaatatacctaactagaaattcttacttacggaagaaaattaagtggtggttccttcggacgtagaatcagcacagcattctcgtaaataatgtgcttccctgaggtttttaactaaaatatttttccattgtttaggattctgtttctaagaagaaaaatattcttttataactgtgattccagtgtaaaaagaagcatggcttcacatagtg

SEQ ID NO: 125 - DNA, 1002 bp, Homo sapiens
ttacctagtgcttatctccatagcttatgtttttcatcatgctgctaagggtaactatatcacacttttgtctgaagtccacagctgctagttttacgctgacgatctgtagcatgaagttgcattgtcagtgtttgcatctgaaatctggaaacgcaggacacaaaaagttgtgtctgatacacttgcattctgaacctctgtatgctggtgttgaggcatgtcaatttcaggtctttcaaacaaattttatatgtatacggttctttaatggaaaatagcatatacctctgcttttgagaataaaagaactgtaaggaatttagtttactttttcttaagtattttggaaacatttctagaattctttccgtaaaatgaactatacaaaagtaaacaaattaggaaaaaaaacatagctaagaagtatattctgttgcttgttaaatttcttccttaatctgccaaattgagaaaagtacaggtatatgtggaagatattgccaatcttttcaaattttgtcatttttagtgtggttctttgtctagcaaaacgtcttaccttgtttttaagttctgtaattatctggtaatacttcttgttgtcctgtttttctccttgatcattagcccaggctcaaatttcttattccattctttgattttatattcaagtgtactctttgcctgcaccagagttgagaccttgtccagggaaactgcaacatggtcatctagattttacactgcatccttcttcttaccagagaagaacccacccacctcctcccaagttggtagaaaatctccatctgggttacatttctgcctataattctttctttccaatgatcagtatctaattgccatagagtagattttggggctgcgtgtgacttgatggaagagcttagctctacaaagcccaacagagagagtggtaagggaatcatcaattagtaattcctcttatggttgataatgtggctgtttcatctctgc

SEQ ID NO: 126 - DNA, 688 bp, Homo sapiens
ttatttgttaaactcaatagactatctttttattaaaaggcgcagaaaatgcctttaggtatttatttcatattggagggacaaagcagataatatttacatgatatcagcccaattaaatttgtgttttcccttatggaatttctgcacaaaggaaaatacctttttataggcacaatgcttataacacaaagtcctttggaatgatatgataaatattacttattttcagatgaagttatttgaaactaattttagggatttctggagaagtaacagaaaggggcagatccttaatttctgtatcctgtatattaaatatttgaagtatttaagaataaaatttaggaaaataatatgaaaataaatgacattcttctatttttttcttgaatttgattgattctaagaaaataaaaatttaaatttattaaagcctgtcttggaattttgaaatagctaatgatgtctaactttttccccttatcttatgaaagtatatgacctctcccctgcccaagagagttaaagaagaatggaggaactgacataatagagttttgtgggtggatttaatgttaaatagcaaacttgtaagtttctccaggttcttgtaaacctctgcagtggctgtgtcttgctccttttgcggttccttttgcaatcataggaaaaaaaaaaaacatga

SEQ ID NO: 127 - DNA, 734 bp, Homo sapiens
ccccatgatttctatattaccaaatgcatttttcttcatgtttgttgtcagtgcagtgagataaacccagaggttgatgaaggatgtttctatctatcgttcgtcaatcaatcaatctttaatgaaaggtgttagacaatattttttggtaaaaacaaacgtggtgtgagttgatgttctttctctgaatggcttttgcttcattttactttattggagagtctgagtttatccctatggcttcgaacatcctagtcactaaataaatatattttttaacacttttgttaaaattgaaacaacttaacactcattcttagaaaaaatattccaatgacaaatttaggaaacttatatatcaagctgatattgttattggcaagtgtggggctattggtggatgctacttgtattttagttctgttgcttttgcttttttttaatgacacaaaatatatttaatacgttaaatgagagactaggaaatatatttaaagatctttcaggctgacataatgaccgcaaataagtaagacaaaaaagctttggtaaaataagtagaattaaaaaaatgcagttctgtgaattaacacaagaaaacatcagatgaagaataaagtttctctgccaaagttccagctcaacagtgctgtgaatgtgatgtggctgctgctgttagacaatattaaaaaatttacaaagcccagaggtcgtcttcccccagctcttggccc

SEQ ID NO: 128 - DNA, 517 bp, Homo sapiens
tttttatttttaaaaaattggttttcaatgaaatagtttcctccagttgctactactgtgagattatgaagctcatttcaagatgctcctgtcctgcttagaaagctggtcttcccctggttttgcccttaacttgaaatccagcttcagttttagtggccaaagggccatgtggtagcctgctttatatctgaactcagaccaatgggtatcttttttagttcttctggtctccaatgtcaacaggtttctcctgtctacatagatagaaaactgttctggaaattttgaagcctccctgtttaggcgagggagaagcagttttggaaaaatgaaaaaaaaaaagtacttttggggggtacctctcacagaaataggccacttggtgagtctaggatatgaaactacagaacttcacttattttggtagagtagaattctagctcatggaattaggagatggagctttaacttgtaatttttccactttatttaaagggagaggcctttaaataaa

SEQ ID NO: 129 - DNA, 704 bp, Homo sapiens
gcatgcaatgcacatcctatcgcaattttgttataagctcgcatgtgcttataacaaagcacatgttataagcttcatgttccttgtggttctgtcagcaaaataacttcatcatgccccctctctggaagtccaagctttgtacacaggatacctctgggcttgtcccttacctgctatttaagtgctaacttttaaaaaagtggttgaactattaacatttgcttctttcctgcattatcatttcatattgacattgatattacaaatgagtactttgttttcagaagggcttgatcaatattttctgttacccaagtgtcatatctcagccactgaaaagtttttaaagtggtttattacttgtagtattttgttccttgaggaggttgtgtggataatattacttgagcttcattttgggtgatttatattcaccagtttgtctcctcctgggtgaacactgtctaattccacgaagtcgtcaagccagtttaggccactttccttagagcttcaaatactttagccgtttactctgagctgcctgctgtgaaccttgtttcttgtttgtcatctctgtgaggatggatgccacgtcgaccattctcatcattcttgtgtatacttccctgaggtgagaaagaaaaaacaaccctgtgaatctctggattaaaagtcaacgggtgaaaacccatgtgcga

SEQ ID NO: 130 - DNA, 1750 bp, Homo sapiens
ttgcctggagagctgaactttagggtctcacaataaacatattcctattgtagagttttaaaataattttaaggcaagtaataatgtatgaacaccatgtccttaactttttattcagcactgtaaatacgttttatgatccaaaatggttgaatagtttcagttttcaaaattgaacatgcccttaacaacacattctattgtgtctcagtgttctggtgtctatgattgggccttttctatatttgtaaacaatcattcagtacaaacgcagcatcttaacgcatgacaaggaagaacagatgagggttttcacctcgagatgactttcagagtagccttatacttttgccttgacatgaaaatagtactagccatgaacataggtctcaggtggccaaaatccacagctagaaggttagacttgagaagacccacagagagaggcttcgctgatgtggccgggatggcttaggttctgcaggctgcttacggcagatttccatttctgctcttgagctatgaatccagttggatgagctggttcagacttttagtatttcagcagagaagaagcattcagggttttatttattgtaatgatttgatggtggaaaacagctttgacttaagcaacttaacattgctctttttctttgagtagtggtttaatgtttattctgtggttagctattaaccttattctgtggttagctatttaagcagaagtcataatgtacccagaggttcattttaagttttattcaatgtgcccagaagatgaaaaactacatgttttgatgataggtttgatatgctcacacaattcttaattggttttatattggaagatacatgttcagatttgtccttttataactttacatttggctttttatgccacgtcccgtgttctttccttgaggactggcttgtagagttgattctctaatttgtgatatgggcatattaaattccttgattgagaaagcccttagccagcctgggttggtgctatgcctggttcttcctggggcccgtaccacctcctacccaatcttaacaggtttcatcatcccaaacaagacaagacaaagccatgtggcctcagggatactgtagaaatgaaagaatagggctatgaccaccaacgggatgaaagatcttagcagtggagactggggaaaagaaacaccagcttggcgaagtggcaggttttggctaaagatgtggctagatttggcaggggaacaagtgcctgaggatctcttctctttggggctttcaaggtttcaggaaatcagattgccatatcacatagccaatcttatttcccaagactcttttttggcccctgtcctaaatgtcctgtaaacacacatgtctgattcctatgtcacttctgatgcagattgtgaaatcaagtctttactattaacagctttttattgcttgctgtcttctttgtgttttagctcttcttctctgctgaaatgtgagctttttgaagtaggagggagattttgagtttcttttttatcttataaaatatcgagttcagtgatggacatatataaactagacattaattataagttgattattaaaataatcacatccttctttgtgggctaagccgttgacacggtagtctaatttcagctatcatgccactgagttcttatgtgatgccattaaaaatgcccacattaaaaaaatgactataatctgaattgtataaagaaggtaa

SEQ ID NO: 131 - DNA, 902 bp, Homo sapiens
gtaagatataaagaatgaactgacattagtaatatagtcatgcagctagatcatacttgatagcttccttcctaggtaaaatactttttaaaaaaataagtaataattaacttgcaaaagtaaatttattgaagcatagaaacaattaaagcaaagttgttaattcagctatttcaagagcattctaatgaggaaataagaagatgcagaaaagttggctagtcatccatttctggactgaagcttttcctgaaattatccagaaagatgcctagattgatgccatttcttcgcttgtgtccttcttgatttttttttctttgaaagacacttttgttgatctggaagttccttatttaactttcacctcagaaatactgctgacttgagacgagacaaccttgccatccaccaactcctctacgatagtcttagtcactctagtcttgcttgaatctgaaaatcatgggattgcaatgtcagtctggaaactctcacagaaacacagagcaagagaaattcaatcacatgcattcaacgtgttctgtctgggtaagattatgtaaaaaatagcggactcttttagtatgacaagcaaagtatgtcttcacttttaaattacagaactattatcaatattaaaaaaagtctacctcgtccttgaccagaacagcttccagatcttgagtcaccagataccagatccctggatcccatgtttacagatcctgagtttctaccaccaaattctgcaaaactagaaccactggagaaaaaaagaattatgttttcctttgcagtttgcaaaggcaggagaaagcctccgccccggggattcttcatgatgaagttttggatgtgtttatgtgttttaattggattgtgtctgctgcttttttgtt

SEQ ID NO: 132 - DNA, 1263 bp, Homo sapiens
tgtgtctgttactttattactctctatatatacaagtctaagccctgagtcccattttggttttataaaataaattcactaaggtatgcattttagtttgttcatgactttggtttaccctccctctccatcgagcaggcggcggtaggtctcgatctccacctccaggcgtgtcttgatgtccagcaattgcttgtactctgcgttctggcatttagtctcaccccagatctggcagatctcctcctccagggcactgatctgcgtttgaatttctgacagctgagccacgtagccagcttctgtgtcagccagggttccctccagggagcttttctaagagaaaaagcaaataaaaaattcatgatgaaaataaatcattggatgattttttaaaaatgcaattttatgtggcactagaagtgcaccttcgccatataacctatattgttatatcattgcttctttaattttggttggcacttctttttaaactaaatcttttatgcaaaatagagtacattatctttaacttttaatgctttctataatcataatgcagttctccttaacactgccttttttatgtgcctagtgaacctcttggcaaagaaagaaaactgcatttgcttaactccctgttggaaaatgtgaaaagctatttgcacataccatggccagttgggactgaagctcaatttccagggcttgcagggtacgttttagttctgttatctcattcttggcagaagtggctgccccagcatcagtggagatttgtgcttgtagtgatgcgctctaaatacaaacataatgcagctgttgtaggctgatgaaaggagcagaagcggcttgtgtgtggctactggcttaggtgctcagcagagaggatctacctgcttgttgaaccgctcctcagcctctcggcggttttgctcagccagctcctcgtactgcgccctcatgtcattcagtaatttggtcaggtcggtccctggcgcagcattcatttctacggtcacctcccctccagagcttccttgcatattcttcatttcctagcatgaaggaaaaaagactatcgtgatgcaaacagaaaagtgatgacttccgaaaatgtgcctagacaacaacaatttgaaagtaggacactgaaaggaaaaaaaaaaaatcaaatctaggtataatttactcatgattacttttgtttcctggtcatagtatgtgggaaattcacttagataaaaatgagtttattttacc

SEQ ID NO: 133 - DNA, 655 bp, Homo sapiens
atttgtatagaatgcatatggggagaaatatgttagctagagttattcgtttatgtagaacatgttcctacctcctcgtggttcttcctcaggtaggctagctcctcggtgaaactctcaatctgcatctccaggtcagagcgggtcatagtcaggtcatccaggactttccgcaggccattgatgtcagcctccacgctctgccggagacacagctcgttctcatacctggaaggggcagcagtaaggcaaaaaatactgtgagctcacctggccgtgtttcaaagggtaccttccattcttacatattgaaaaagttctcacttgtgggcattttaataaataaaggttattaagttttctcttgggaaattttcccttgtaaagaaaaataccaatgtaatgttaattctaatcatgtctaacatttttaataataaaattctcattctaaatttgcctctttcttttttctttttcttttttcttttgcagctgttgtaggctgatgaaaggagcagaagcggccggtgtgtagctactggcttaggtgctcagcagagaggatctacctgccccagcatcagtggagatttgtctaatggtctaaagtttacccttgggatgtttgtaaatttaggtcatgatcctctag

SEQ ID NO: 134 - DNA, 1214 bp, Homo sapiens
tgtgctattagcttttaaaggtgacttgctttgcaaacttacttagtaatgactaagtatacagccccagacctgtatatctggggctggtatatttaggactacatctttctgcaaaaagataacagtctgcacatttattggactaggcacaggaacctgttttacaggacatagtcctctgcatatttctgctactttgttagatcattatctcatgagctttttcagaaaatagtgcaaaaattgtatttcacttccaaaaaagtctttaaaaatatatttcccatacaaaagtggctaaacattttagattctactacattcttatgtaatgtttgcaccagattttctgggaagaaaaataatactaaagaatatttaaatcttgtaagacaataaaatgtgtcagtctgtcagaattcatcataaataattagattaaactaatgttgactcactgccaccattcttatatataaatgataattagctgcctggtgttgtataagttttactgttatgtagaaatactgaaactgagatggaaacagaaaattaatgtgattggacatcacataaggtactataataattaagacacatcaggtcccactttgcatatgtaacaagcaaatatgttttcaaataatttcttaaaattttcattatagtacatgatctgaaaagaagtgaaagatccacaaataatagaaactcaggcacagatagtctcacctggtttctgagatcttcaattattgaatagtatttgctataatctcttcccgatccaccgtctccagacccaggcccatatttgtcataccactccttgattttgttctccagatcagtgttagcctcctccagggctctgaccttgtctaggtaattggccaagcggtcattgaggttctgcatggtttgcttttcccctccagagaaaagccccccatcgccaacaccacctcccataccaccaccatagctgtagaagcctccagtagcaccactgctgaatctagaactcccacagaatccagaacccctgccaaatccagagaccccgccaaagctagaacccccaccaaatcctgtcccagagcctgaagctcccccaaaaccaccccctactgagcagctaccaaagccccctccaaagctgcccccaaaagcaccgctagaccccccactcaggctgcagctgctgg

SEQ ID NO: 135 - DNA, 1197 bp, Homo sapiens
ctcctcctcggaagccctgggccgagctgccccccagaccacatctgcttccactgctgaagctgcttccaccagcagacaccctggctgagctgctgcctccagccctggaggaggaggcgcgagacgagcaagacatggtgctcctgcaaacatgagcttgtccaggcgaataggagaggtgatgacgaagagtgtattcaaggctgcctttttggcctttatatacacacttcgagggtgttccttttctctgtcacttcttaatccctgttacagttttggtaatccgtaattggataatttctgtttcttgaacacttctctgaagctaggtcagagccctgggacatttactatatcaataaaaaaagaataaagtggagcaaaacaaaaaaattttcagaattacagttttaatctttcagaggttttgatgattggtaacttttctctggaagtgtagttctattaaatttgcttcatgatttcacatttgcagagaatatctccaggttaacaaatgtaattaaaatacttaatatgatgagaataaaaatttcccatcaatcatgtaacttttttgttcatattgttctcaaaagttgaaattagctttcacatcagcaataatttcagatttgattaagcatccatctctttgattatttcaatcagcgtgttttttaaggttgttgaagtttgtgattttaagttattgctttctttttttgtattttgtataatatacaaaaaagcatataatttgtaacaattatgttttatagttcataagaaaaacataaataatagttttctaggtaagtattattacatctcagcaacatgtttattcaagtagctaatgtctaagaaagattgaaaagcttttaggcagattgttttaatacgattttctttctggttgaattctagtctgatataaagacagcaacttcctttttgagtcaaatttcaagaaatgaagagatgatgcagatatctcctgccttcgttttaaagataaaagaggatttgtatctacttctgataactagtgttacaattggagttattttatagattctgaaccctcctgagctccctttgtgcttcatggctttttgtccctttgtattttagactgtttccattcatgtcttctagtcacttcaccggtttaatagtgtctttttg

SEQ ID NO: 136 - DNA, 609 bp, Homo sapiens
gtcttaaaaaacaggtgcttccagaaatagtttgtatcctccttagctttaaacttaagtagctgacttttgtttatttaagaatttcttccttcttttgccagtctctgttaaactatgttcacaccttaatctttatattcaattatttgttaaacaatgttctgctttaaatttttccttaaattgcattttattgggacacatgattaaataggtaatcattcactttactatgtagctcttatgtggcttttatgatctacctgtactgttttcacaggagtatgatgttactcttcttcatatttagggtgacatatctccaaggggtacatggtgtacaaaattttaaattgttaagctgggagtaatttttataacgcccttctaaagtagctaaaaaatgcaccacacataatgtgttggtcatcctgcctcgcccatccctaaagctgtgaaaccaaagaaaactaaaccctaatgattaaatggtatgcaaatgctggcaatgggaggaacagtcacagagtgtttctcccttttaaaactatgaaatgtaatctttcaattttcataaagacttgcatttggctgaaagcacgttta

SEQ ID NO: 137 - DNA, 508 bp, Homo sapiens
gacagagagagagagacagactgaatcttaggtgtctgggctcccagttcaaattttgaatagtttgtgattagaagtttatttctacctgtaaagaaacatataaaagctatatttccttatagaatatgattttaataataagtgcagaatgatttgcagatagtaaccatcaatttttttttgtgtgtgtgggggatagattattagtatttaaatatttttcagattaacatattgcaggtttttagactagtaggaaaaccaaatactgaaatgcatggcatatggctcctgatgaatctttacagaattgagaacagaacttgggtattctatcttctgttcattcaagaaaatatactgttttgtgtttttcaaatagaagcatcacatcagagtagttaagggaagttgctgggtttagagtatttgttgaatgttgacaaaactttctgtggcagacagtaaaaaagaagggaaaatatacatttaaaaaaattttaac

SEQ ID NO: 138 - DNA, 1248 bp, Homo sapiens
tggaaagtataaatttgatgtgtgaacagtctctttgcaatgccgttgcaatgacagatagtagatagacaataaatattccttgaattaataaaaactaacatggcctgattttcttcatgaacaacttggatcactgattacttttgttctttactatgtgttgtgttttgttttctgaatctttatgctccacttctgggttagtgattctcagtgtgtggtggcggagagcggggcttggcagtaagaggaaatgttgtttgggaagagggcagaaaggtcaggcaagagtcaaccggggaccttcctgtagggaatcattgtttgggccagcttcctgctggtggctgctctaggccccgccagggtcaactacttggaagagaaaaaaggttttgcaataataacatgactaagagcccactccagtagatctggcaccacccgtcgatggattgggtgtgtcattgtcacaccccagaaatccaccaattctgtggctgtttctcttccttcatcactttctctccttccccaccaccctcgtccattctttctcttcctggtttcacttaagtgtgtctatttgaaggcttcctcttctccaccaggaagcatctgcttggtcatgccattttgccaaattttgttctgggaagaaaaatcacctggctttgttcttgtatgtgagtgctttcaaatctctttaaataactcaattctctatgtttcctgaagatctttccgtgagtttatggagaattaagagaatgggtgagtgactttgcgggggttgggatgctttgtcctccaggctccacagataagacagtttgaaataagcacagttttcaaggattagctctgcttaaaaagtccttttgtgcctttcttcataccagacagacagtagtcttctcttcagagaatccaaaagcatgaacaatccagatcataacttgagcagtagggcctagcccctgtgcctcttgccaatgctaagttgatacactgggccttcctgctctgtctcttccagcttgacccctcaacctcctgctgccctctgatgtcagagaagctgcaaatctttggtcaaggaatccagggcttaaatagtagtttcatagcaaaagaatggcatggtattttacacaagatcatattttatatgataggctcagaagaaagcttcatcagtctcaagtctcttgtcctctgtccaccagaactataacacaacat

SEQ ID NO: 139 - DNA, 969 bp, Homo sapiens
ccacatataaggcaatggcagcactcttggagacctttctggtagttagccaaattattattgcccagtgggtgatctctgtgctcatcagaccagtcctggcaagactcaccccagggacagtgacagggacagactggggtgctcagcctacctgcagtggccctggggcatgctgggagagaaaggggcacagggcttaccctaggaggagagggccctggagaagccatggcaaagctgtgaccgtgggtgggcagagctgatcagagtctgcagatttgagctgggcataagaggctgtgggatttggacacaggggccatccatactgttaccagaacgtggagaagagccagtaggaatactggctatgaagccagatccttccagaaagggagaaaggaacaggactctgttgtgatgtggaggctgactaggtggagtgaggagaaggtcccagcaagcaattgtgcttgtcttttttgtgcctgtaaccaggagggagacagagaaaccaggtgcccaggaaaccttgattgaagggtgccaggtaagccctgtccttcccacagtggcattcaacagcaaggccaggacctaccattatctttctgtgtgtagagtggacacaagcacatatttctaaagaggactaatggatgatctttaggtactaacttgtgacccattcattggaggtcactgggtgtttctagaagtacttttgatgtgactgatcttggagcaaagcctcaaatcacaccttattctgttctttctatgtatccaaattttaccacttttcaagggctatctcttctggaacactcttctggaacactccaacccttcatttaccagcttctccttttccccacataatttttcttattattcttacggtttctaccacattacttatcacttggtccttcttgtatttttctttgacaataaaaaaggaga

SEQ ID NO: 140 - DNA, 921 bp, Homo sapiens
tattgatatggttatctctgttcctgagtttatatatggggacatcagctctcggatggctgtatatgacaagtgcagtgaaaaccccgggtaccatgtggcattgctgaaaatctagacttaaagtgattggctgttggcttccattctacatgcagcccccaagagggtaggctaaagttcttattttctggagtgttggggggatatatggcaggtggacaggcggatggggtggctagggagaagatggggaatggggaggctgaggatgagtcagggcaactaaacaggctgcccattcctggaactgctgctttcttggaaatttgcaagcccccaaatcctcttgattttagacagataagacagcagacagcaggtggtgccaaactgcagctagggcatcgtgatttaaagcgtgcggtccacgtctggactctgtggtctggctgcacagacttcccttggtgttggagcaggttttcaccatacttcactaaatttattttttcttttgcttcttatttcacgttattttcttgatataaatctgtcctccttttccttcatgatgtttttgtttttgatgaaacaagccatcaccattccccaaatacataattaaaaaaatttaaagtctgtaaaagtttattttcttttatttctgcaacttctgtagaatttattttggtgtgtgtgatataactattcaacaccctccttagcctcatccccatcccggctcctaccccttagttaactagttatttcagcagcctttattgaataatctacttgtccacaactgatttgaaaatgtcattcttatatactgatggccctttttctggggtgttcatgcctgtgtcagtggcacattgttctaattgctgtaaagaatacttttttttttttaac

SEQ ID NO: 141 - DNA, 692 bp, Homo sapiens
caagtcagcgaaacaaaaggacaaagattgatgtagttgatttgcaacaggcaaaaagtttatcgacacagaatgattaagaaggaaaacacattttgcaatttaaagacaaaaccgaaccaataagacaaaagaatctgagaaaggattacaggagtagctgcagctctgtggccgcaggtttgttgcagtgcttcagcacgcctttgttaggtgtcatcatttacatcctggggacaggactcagctgcctgcatcttactcttgaattttacatcagaaacagtgttgagatgaaattagttggtcattatccgtcaccagcctggttcctctgcttttatgtgaatctaaaacagaaatagggagaattttagaactggaaatgtaaaggttggttcacaagtcatgctttaaagtgaatgactgtagcccagatttttgggggtaaggaaagcacattttattcatgatggatgctcattaaataagcagaaagtattactttaaaaagcgactcttcccctcgattgagctgtgttggttattcctttggagtccacagagaatcatcctttagattcagcttctctggcctcagaactgttgacaaataaaagaaatgattgttgtcagttacttctctttggccaaaaactgtaaagaagcagacatattttctttctgaatgg

SEQ ID NO: 142 - DNA, 751 bp, Homo sapiens
tgactgcaattatctaggagatacaaaaaaaactaatgaacactttaaggaataacatgtaatttcttatttacattcaattatcaagatatagatgcagaaaaattttaaaggaactaacgcccagtgtcaattacattctaaataaatctagagtgataccatggaaagttgttttttttttcttttctattttctactagcttttcagattgtacttgatttgaaacttgctaaaactgtaaatctcagtctctgaataaaaaacaatttcttcatttttaagaaagtgattttaacaacaaaatcatggtatcggtgactcaccctccctctccaccgagcaggcggtggtaggtctcgatctccacctccaggcgtgtcttgatgtcctgcagttgtgcatactctgtgttctggtattcagtctcgccccggatctggcagatctgctcctccaggatgctgatatacatcttaatttctgacagctgagccacgtagccagcttctgtgtcagccagggttccttctggggagctttgctacaaatgcccatgaaaattgaagcattgtcagaataactgctcagtattcaacatatgaaccctgaaacatatattttgtatggtgagggtgtctccaaatgaaccacttaatagagatttacctttgataattaataccgaataatagtaatgatagcaaatattaatcagagagtactactgtaaccatatagcaattccta

SEQ ID NO: 143 - DNA, 933 bp, Homo sapiens
agccaacattttgctagcttgcttcaaacagtgtctgcaaaacaattttttaaaactatagaagaaaattgagtgagtgcccctttcccacctaccatggccaagacagactgcagttcatgctggagggactggaggacttgtttcagctccattatctcactcttggccgagctaactgcttcagcatccgtggagatctgtgtctgcaaggatgcactctgcaagcatgaaatcaacaaagtacagtgaaatcaaagaagctccaagcactctgcctggctttctatcttctctcactttgccaggttagggttcatgttaggattagggttgagctacctgcttgttgaaccactcctcggcctccctaaggttttgctcagccagttcctcttactgttttgcctcatgcagttcagccgcttggttagatctgcccctggggccgagttcatttctacagtcacgtccccactggactgtctcggcaaagtactcatttcttggcggagaagaaacgcaaaagtcacagtagcaaaaatcctttgaggttggggaccttgctgaatggtgatggtgatgggaagtcccttgatggatttatttctcctatctccttggggttgttctggagatatgccaggtcttctgctaggctttcggactgtattttaaggtgccatgtggtcacattcagctcactgagtactttttgcagatcatttacataggtttcaactgactggcattagatagagctcgttttcataccttaggagatctttggaatatgatgtatgaattagattaactactttgagaagctttattttaaaaaggacttgtccactgacatccagctcaagttgaaattcttttgaaatatttaaacaaagactatgaaatcatttttatttcttaattaattaa

SEQ ID NO: 144 - DNA, 2215 bp, Homo sapiens
tgaaatcatttttaaaaattccaattttggaatctcttgtcattaaatatacattaaaattggccttttttccttcagtgtagatattttacactaatatattacatttatctgatacttggatctaattgcctttatatacattttatgttaaaagtaaaaacataagtcttattttttgtcatggtaacaactgatattttgaaacaaactcacttcattttgaagtcatctgctgcaagtccagcactgtcaattggggaagtcatgctggcattattaatcgtggctgcaatgatctaggagatgcaataaaactcatgaacattttaatgagtaacatgtcattactgatttacctttgactgtcaagatatagttgcagaaaatttttttagtaactaatgtccgtgtgaattacattctaaataaatctagagtgacatcatggaaagttttttgtttcttttctctctctctctctctttttaccaaatatatatctgaaacattctgcatggaacaattgagcaaaaaataaaagaacaatttcacattgtcttcaaatttaataaataagtacaaaagaggtaccatcattgagtttctcacctggtccctgagatcttcaattattggatagtatttgctgcaatctcttctagatccaccgtctccagacccaggcccaaatttgtcacactactccttgattttgtgttggcctcttctagggctctgacattgtctaggtaattggctaggccgtcattgaggttctgcatggtttgcttttcccctccagagaaaagccccccgttgccaccaccacctcccatgccaccaccatactgcagaagcctccactagcaccaccgcctaatccagaacttccacagaatccagagatcctgccgaagctagaaccacctcctacagagcatttatcaaagcccccactaaagctacctccaaagccactgctagacatccccactcaggccatagctgtcggctcctctttggaagccccgggcagagccgccccccagaccacatctgcctctactgctgaagctgcttccaccagcagacagcctggccaagctgctgcctccagccctggaggaggagacacaggaagagcaagacatgatgctcctgcaaacgttgagcttatctaggtgtgagagatggaagtgaaaagcacaccgatttgaactccttggtctttatgtacacaggttttagggcattcattttcatttggctctgtccttgtttcacgtttccaacctattctgagttaatttattttgagttaacccctccccgttgggccaaataatatttgaaaaattgggtaaacatggagtaagattagatttgttattatttcattagaattcattagtgctgtacaatccattacttcctggctatcattttttcaccttcctagacctttgtagttggcaaatcatacatttctctaggtccattaaactcatgcatttttcctttgtgattctgggaagattattaaaccagattccagtgttagtcacaattcaaatactcagaagtgatttgtcaggaaatatttctttcttttttaacccagtaataatgatgagtagcttcatattcccttaacaatttttgggaacaaattgagcattgtaactattcttgcagaaagaaagcctgactttgctaatttatgaggattagcttggagagcacacttcgttgataagggtggggttgttagtaaagtgtcatgggattcttctgtgcaagacttttgagcaataataatgtttctttttagcctcctgattcagcagccaaaggaattgttcctcttacttaaatccattagttttggcctactcctaaggattttaaaaacattattcagatttcatagccatagttttcattaaaaaaattcaaagataagagcccactttcctcattaattatggatgtctacaatattttattttactctgaagaggtaagcctataatatttacctctgtcagctacataggtgaaaaggtgatttcaatgttttaaatggaatactatagaaaattgaatttattgaggtggataacaagtgcctacactatgcgtgtcttgggttttcctgcatattactgatggaaggacccaacaaccctgtgtggtaggcacatcttctctc

SEQ ID NO: 145 - DNA, 1169 bp, Homo sapiens
catggcataggattatcacatcaaatggagagcgcagagcactctgtaaattgtaattccatattcaagcataaggtttgatcatttttattgctgttttcttgcatttgtactgtattagttattccataagaccatatgtttctaaaccgggaggtcagcctaacttcatctattgaaaggtccgtcatagtcctcaccatttttctatgtacatttggtgttccatttgatgtcttttctaaggggcttatctttgaaatttttatatataattatttacaaaaaaagatgtagaccctatctatggattctttctgatttaagtttgaggttgtattcagctgctctcacataccttagctattagggattgtagctcagtgtcatgggtgtgaagaatacgtttttcagtttcatgatctcatatcttgctgcttcagtggagaactgagctggccatgacttactctgagctataacatcttggcaaaacagagctctgaaatatacccctattttatttatacttatatatttgactagctactctattaattgaattgttctttagcttcttaatagttttgcttgacaaaaatgttgcgttacgtttatcaacattcaaatattaagaccggtcggcagctggggcagcattccttacagtaattatatgactactagactattccgcaatctcattgcctaatcaaaaggaacagaaaagattacattaaaacaggaaaaatctatacttctattttctctgattttttttttttcctaaaacaaaccctgaagaaaatgattgttttggaggagaggtggaaaagcattgaggcgtgattcccttctgtggtgagtcactttcttcagtttggtttcatattcatttccaggccagcagttgtgaaagttttcagggcattgcctgtgtcgttgacctccattttgcactctacataaacccagttttgatgctggtgttttggaaaagtggttaaaattgtttcaaataaaaatattttcccaaatgttttctattaaattacgtgtattttttttccccctgatatcaagtccagtaacttcaggcaaatttagtgaaattctctaccatctagaaagggatgaagaacttaaaggaaggcagatgaattccttcc

SEQ ID NO: 146 - DNA, 630 bp, Homo sapiens
gcaggggggtgggggtggggcagtggggagaaacccttcatgtataatttttgttgtattttatataatcacagcaagtcttctcttacatattcttcaccatgttcagtaagtgtccgaaaaataatttgcatttttttttcgcctgctgagaaacagtagggagatattattaattgtccaagtgttgacctagaggaagactctgggctgcagatggctgatttatcatcttcccttgttggcaaatagctgccctagttacagacccagtttccatgtttcttggtaccagaagctcactttgccatcccactacctacttccagtccaccttctgccacagacttgcaaccatgtcctgctgcccagtagaacccagattctctccccagtttgctgaagttttgtgctgctgctttgctgctaaaaccaaaaccccatctgtcatctgctgctaaaaagttgtgccatctccataaggtccaatcacccaaattcctttccaccaccaaaccgtcgagaccagtgtaggagacgctgtaggggagcacgtctatgtctctgccattgactgctccagtgttctagagtgttaacatcataagtggggcacctattccatcttaa

SEQ ID NO: 147 - DNA, 517 bp, Homo sapiens
gcccctcctaacaattacatctaataaagaggttgaagagtgtaggtttttttgcttgactcatcaattcttcaattagtggataatacttgttgtaatttttggctggaccaaatccctgctgactttgttgagtgagcagcttgtttaatactgtaccctggtaactgagggtttcccagaccatctgttcttcatgtgggaaaagcccactgttgtagaagttggcctttacatctcgacactacctaaactgcaggtctgttcatcatcatggaaagctacaccacctacaccgctatccctaatctgcctcaagtgccacttttcaaaaatatgtcctaatgatttatcagattaaacacgtttggctcctttaaataagacatcattttcttgtctaacctcttctgctatcgatgcttttgcatttccacatcacttttgcagttttcagctacatttgtatgtgtcattgtaagtgaatacttactagagctgtgagaggcaatgaggg

SEQ ID NO: 148 - DNA, 773 bp, Homo sapiens
aagtcccctgaggtacagggcttatggttgccaccttcgctgatagtctctgagggtgtgtcactgaccatccatttaccttgaggaggtgctaggctgaaaggtgtacacgcctgcagagatgaagtttatgggtaaaaaacatggttctcccagtttttatgattccttacacatgaaattcagtgttcctccataagttctgtccctttgtagtgatttaaaaattatcaccacatattttatgtttcataatattttattttttgggggaaagaaagaacatctttgtgtatatttgtgttttaactgtgacacaggcagatacagtaatgcggttttataacattaaaattttaatcctttttaatgagtaatattttcttaccttttactctaatttcaccaactttgctttcagatcttccttgtgagacaagtttggtgaacattataattaaacaaaacttcccatgaaatctaccaattttcctatgattctgagaatcatacttgtttcaataaccgagaggcattctgtctttgtcttggtgaattctccttagtgaagtgaatatattttattttctcttcattggcattaaccagtggcataaaattaaacatttttggtttgcgttgcagaaaagacgtgacatctgatagtttgttgctatgcctgcccataagttttgaaatcattttctataaaattgctttttgtggaataactttcaaggggttgagttttttgaaatccttgccaaattcct

SEQ ID NO: 149 - DNA, 637 bp, Homo sapiens
cttttactttttgtctgtatattaaaatcctaaactaatatataaacgtaaagtataatcactattaaattaattgccagtgtttgttttcttaagttctgtctctagacgttaagaaaaatctatattgtaggtgaagaggaagggaagagtgggttttatgtcttggaagataaatttttatgttagatttaaggcagtacccatttgtaattttgtcttgcatttctgggtctagaaacttaattgtggcaatagattgaaaatactactttctgatatgtttgaaacatgcctatttgcattgcttgaatttcccacttttgctttaatcacctggaaaatggtttcagtgaatgtaagtttttcttaagcttgccctgattcaattatttctcacacaaaaacttcatccctcttctatagtcaaagattccgaacactgttagatccctctgagcctgagtggagatttaggtactctcaggggtaattgtctttattttctgctgaggtgacttctgtagaaagatctcaagtcttttctgcaattaggctttgcatacatgcatgtgccgaagattggcaggaactcagcagatgctaaatattaaagacggtctctaacagagaactc

SEQ ID NO: 150 - DNA, 742 bp, Homo sapiens
aacatacccctatagaatggagctcagaaaaagtagaagggtgtttcttttctccctttttggatagaaacttccaagtaattgtagcatatcatgagacttgagagtatcagtggcctagtgcagagcattaaattatagtggaaaagactggtagccagaggttttgtatgtagttttttataggtggcaactaaataactagaaaaattaaattagtgcatcaatgttaagaagacttcatggatccctgtaaactggtggagagtgaggacttctggttatgtttcagttactaaatcctctaggtaatttacaaattatagccatgctctcttaggtatataaatatacctctttccatattaagcagaatgccctcaagaaccaatgtggttacatttttcttccctttttggaaagctttcaattacttcctacctttgacactagttcaggcatgttaaccaccttgccacatagaacctcccatctgagcaggaaggtttaggctgcaatgagtgccgtgttcctgcaggtataagtatcacagaggacaggattaggaacagtgctctctgtatgttctttgtagacttgccattttggcaacacagtcattggaactaggtcattttctcctgaatatttttgttttaattggctaatttattcaactcattgtctgagtcttatggtaaagtagggagaattgtcattcacctttaagaggattgataag

SEQ ID NO: 151 - DNA, 578 bp, Homo sapiens
cttcagtgttgccttctctgacaagtaagggactacattttctttagcttgatatattcctttgatgcattaataaaatgaattagaggaaaaggtccaagccatggtgctctgacctgctcactgaggctggaaccactcagctgtagtctgaatcctcataggactaccgctcctgatcacattctcatgccctggaaattgatcacctggaattgtggaaatagttctatgtacaaccactaggccattcctgaggctacaaatggtttctgaaatattttctaagacgtgaataagaaaaaagcaagggaaaatgaataaaaccaggtgtgatatccaaaatagttaacaattatatggcatggacatggatgagtcagaatgaatactagcagctggtaagtctggactggggtcctggacccccccccctgctgtgcctagcatgtttggttactgatggtgtacagggggtcatgggcaagccctgcggccatcgttgaggccattcagagggcctctgggcagtggctacttatcagccctatgagctattttggtattttattatatta

SEQ ID NO: 152 - DNA, 942 bp, Homo sapiens
gattcccctagattcacactcccataggattgaagtgggcactgtattgatatctgttgaccaaactaatggataacagacatcagtcatcctttgctcaaactgatgtatccacatttttctacaaagattaaaggagaaatggaaccgagttggaattatttcacacaaaaactatgaatacacagtttttagttaatatttgtaagcattctccaaggggcagagtgataggtgttttaaaagaacaaatcagaaatgtttgcagaataaaggtggtgactatgaaatatcaatttcaatgctatcttccaccttctcttagattatccctaactgaatatacatccaccatttgggcagttttattacctgtgcaggtctatgcggatataactttaagcttaagtaaggacagatgcaatattataagatttggtttccctatgaagtaagactttatctagtaagacattaatgtaaatacctgaaaatctcataattgctatgaaccaagaattagcaatgacagaagccacagtggcagatggaagagaaacagctttgctagggagccatgaagacacactggctacactgtgttagtggaagctctggaaacatctccagaaagttgttttctttctgcaacatagtaattattctatttcaaaaatcactttccaaatgaagtagttctattactgaataagagtcttatttttgagaacattcttgattattgttattaaatggatgggaacagtggcacagaacccaaggggcataaaaccaacaaagtgttttctatttggcggggaatgtcttttatgcacacatttgttggggctgcattgtttgctctgggaactcaagacaaacaatgcaaacaaagtctcctgacttaccttaactctcctccctcctgggttcctccgaccc

SEQ ID NO: 153 - DNA, 527 bp, Homo sapiens
taaccctattttctaattcatgtctatctgcatcctcatccactgctcaatgtgttcctgacctcgggtcttcattgtctgcagagttcttctttctgatcgactttcaaggtatcagtggttacctctctcctatgcaatccaaaacctcccctcctgctccaattctttctcttagaaaattgattgattgttctcaccttcgtgcttgtgttctaagctaaactcgccacctttccattccactgaatcccttttcagtttgctgcatctctcaatagcatcgttattttctagtcattagtcactttctttacttaaaatattggtattatttttgtcatctgcttaaaaatttttcattgtataatttcctgcatacaaaaaatttagaaattgtgtagtttaaataataaataatagtaaaacatacctgtatcttagagaccctgctgtttctccccagtgatatctcccctattactgctcaggtgtcatcactatcctgagttttctttattacttgc

SEQ ID NO: 154 - DNA, 789 bp, Homo sapiens
aattaatgcttttaaaaagattttaagaggattttatccagcatttttagttgcttccagtaggagaaccagttgaaaccaagtctcctgtatcatctcttgattctcctttttacccctgtgactgttcctgttgattgttcttcatagattttcattcctctacctattgcttaactgttgatattcccattttagaacatgaccccacttcttttttattttacatatgtacatttatcacattcattctctttaatataatttttccttcagtaaaacttaccgactctctactctctaatggagataactggtagttcatcccatatgaagactggcttctggtgagacatcccaggcccctcaccttggaggacacaggaacacagggctttagccttcccagcgagcctattatgttccctttctcttcagggacctgtccatgtctctctacttttctcctctgccattggagaaatacgaaaggtcactcaggggcctagagtctcttcattcaggccaagactttcactcttcaaaaactcataattggaacaatcactggggaccaagttggtgcaaggcacaggctttgctgtatgatgagaagctggtcaaggatgtgtagcgtaagctctccttcttttaaaagcttacagactagttagggagagggagacacctgactcatcacagctgtgaccttttatagttttaattaccaactttagtcttacatgtttccaatataaaatacttcttctggttttgatgtgtatattt

SEQ ID NO: 155 - DNA, 587 bp, Homo sapiens
atgagggaggatttgatgataggcggggaaaagtggtgtaaattgcttcagcacttagacaattacaagattttttttctaagtggaatttttctctgagattgtaatatttttgtttcacataatctaatggggaacataattaggcctgtggctaagattgtatcagaagcaggcaataaaaacaattcagggataattacaacacacttaaaagactctttttctgctttatattttcacttagaggcagaaaccattttttttgaatagattataatatggataatccatccatacaggatagagggtcaactaaatatctagaggtaatatctgatctgaggaaattatgtttttaattaatctaatttatttccctttagtagagagaaatctattggtcaagagagttataaacatcagctacaactttgtagtagaagtggatggctctattcctgtaacttggattctaaactaaaacttttgctataacctctattacatttggaatattgtttaaaatatatatccaaaaggaaaatgaggttgagaattaatcattataaatattgagtattaaa

SEQ ID NO: 156 - DNA, 935 bp, Homo sapiens
aatgtatatactttagttattactaaagggaataggcttcttagtatgtcaaaatatggcagattggggatttaaataaaagtacttttattctttctgaatttgtttcagtttgaattatagggtaagccttatgaaaacctatgaggaaatctattattttgaaagagtttttatataataaaagctgttagatgttcacatatttatattgcacacataaacattctaaagacagtatcaccaatgataacttgctaaagaagaggtttattgaatacaaagaattgacaacagatttctgtaggataatcaaatgagtcatatttgtgtgtggcattcttctagatgaatggggagatgctgtcattgattgcccagaaagaaagtaacagaaagacaacaggttagacatttttcttagacatgcacatttttctggacagatacataatgccttttcttcgcaggggctatgtggcatacgttctctgttgcatctcaaattaattgctttgagatttctcttccagggagtggagcctggtggtaagtattttgctgcgttggtctacctcctcaagaactttcttaaccactatggctttggctgggtctgagcattaaaaattaaaaggagattttatgtagttaaaaaaagaataaaaattatatcatttaaaggaataataggatttgcatacagaatgaactttgcactaagcacaaatacttagactcatttttggtgaataattttgattatttggttagaaaaaacatggtgacatgttattttgtttaaaattagcacaaatcactaatattagacatctagcacatatggatatctactacaaatctttattgtatgtattcttaccaagccatggtaatataagaacaatcaagctatgcattaaaaatgaagtagt

SEQ ID NO: 157 - DNA, 1413 bp, Homo sapiens
attcaggaagcttcctgctcctaacaaccctgagctctagacatccagacttgtggccatgggactttatcagtgctatgaagacaggattctgtgagtgctgagctccagaaaccatttccagagtcagaatcctggtccacatattgaaactccatttagcctcccgtttgttcttttcactctagaagtgatattttcaatgttcatatcttgaactcggtgcctgctgcatattggtttaagatattaatttgtattttggcagttgagtatgtattatatttaatatttagtattcatgataataaatgcatgcagccaaattatgtccgctttccagtggaaagtgggatctaagttgcaagcagatttcagtatattacgccatctatgcagattattttacctacccatcatctcctcctataaggagacagtaggtctcaatttctttttccaggtggagcttgatgtccaggagctgctcatactccagcttctggccctcggtctcggttctgacctggtgcagctgctcctccagggccccgatctgagcctggatctgcgccagctgcgcacagtagttgctctcggtctctgtcaaggagcactccagggagtgtttctgtcaggaagcaataaagagaacttgaaatggatatgcagatatgcagggatttctttgatacatgattttctcctgctgttaactttacatataattgtttcagatttcacatggacacatagttaagactctgtgatactgcttgaaaatgagcaaatccttctttttagtagaataaacctaaagacattcgtgtagttttaggtgtcagctatacaatcctattctttccttatgttttgagacaattataaacaaatatatttcaatattgttaaggtttttaaaaccagctggcaagtatctaacatgatgacctgggagatggtgaaaaaaaattgttcttttcataccgtggctaggagagactgaagttcaatttccagggtttgaagagtgcgcttcatttcagtcagctcattccgggctgaggttgtggctccgacatcctcagagatctgctgctgcagggaggcgctctgaaatgacataagtgaaggagcaaatcttagttttgtgaataccagtaacatgcaaagggaccgttttctggaggagagtcaccttctcgttgaaccaggcctccgcgtccctgcggttctgctctgcaagggcttcgtactcagctcgcatgttgttcagcagaactgtgaggtccaccccgggggctgcgttcatctccacgttcacgttgcctccagctgcgcactgcagaacttgcatttcctagaggcagaaaagtgttctgctcagctctgcaggaatctcatggaaagtct

SEQ ID NO: 158 - DNA, 861 bp, Homo sapiens
aaaaaaaaaagacagctcagccctcatgtctgtctgacaatgtgtcttcagcaccaactttttatatgagaggttatgtacattatctcctgtcaggtgcacagtgtctgcggagggatagcaaaatgtagacgaccagctcttacctctttatggttctttttgaggtaagtcatctcctcactcagggtttcatactgaatctccagatctgttctgcacagggttatttcatccaaaactcttcgtaacccattgacatcagcctctacactctggtgaagagccagctcattttcataccttaaagagtgttaatgatttcctaatttgtcacatggttggagacatagtcactagtcactgatcaatgacaaatgctagcattctggaattttgaagatttggccacaagaggcattttcaaagcttgttgtataataattattgtttctactttgcagtatttgacagaaaaagaactagggtattgggcgctagttttaatagcagttcatgctttgtatttaatagtcaaagcataaaaaagtaataacatcctgtttatgtgaaattcaagtgttttataattttggaataagagttgctaaatttgatgtaatgcgttgcatgaattgccatgaattcatttcactctggcagtctacttacttgagtctgaaatcatcagctgtaagcctggcattatcgatctgcagaacagcattagcattgctggtggtggatgcgatgatctagaaatgggaatttgacttttatcatgaagtaaaccaactgaatctacttaatgcttatttctaatgctaaattggaattctctttaagaaatcacaagtagga

SEQ ID NO: 159 - DNA, 1408 bp, Homo sapiens
tcacaagtaggaatgataaatgtttttagaatttaataaagaaaggaaaacaaaatttagaaataaaggtacatgaaaatgattgtgcagtatgatttcttacctgatttttaaggtcatcaattattgggaaatatctgctatagtcatgatcaagaccacggcaagagccaggcccaaatttctcataccagcccttgatcttctgctccaggtcagcgttggcctcctccagagcatgcacactgtccaggtaggatgccaggcggtcattgaggttctgcatggtcaccttctcattgccagaaaggagcccccgctcattcacagtgaagccagcacagggattacctccccctgtgtttcctcccgatgagctgcctccgaaggcactagagaagccacttccaatccctgaaatgccacaagaatttccagtaccaaagctggttcccccaccatagagtctgagtgatccagtggtgggacgaggacaggacctcctggatgcactggaaagtcgaagagacatggtatcagggcaaacgcgttgcagagctgtatttgtgaaagccagaatggagtgccttcttgtctaaaaggtttggtttgcctttttataggcaagtcccaagtgtgttctgaatgaaattctgcctacacagagtaaaacatggcttgccagtctcagcaagttggcataattgggtgattttttctaattagtaactcactttgctgggctcattcctgtaggagggcagttgccctcaggttggtggttatctgagaaatgggtctgggtggagcaatgtcaggttcattattacgtttttaaatgctgagtgagtcattcttcacttccatccttggaagtaaacctcatcagctcattacaggatagaaatttagcatcatggttttgggctattatgccaaggcagattgtgatgtttctgaggctttttctgcttttattttcacaagtttttccacataagtagagaatagaactgtaatcatttccccaacctggttcttcaaccaataggtttttgtttttatttttaaattcctcttgccactctttcccatgggaagttaacttccattctggctgacatgagcatcatattctgttgacacttatgactgaggagagttgtcttaccttatccattttggtaattaggagcacacccctaattggtgttatgttttgtgggagtttggaaagacattaacttatttcctgaccctgcaaaatctgaagcaaacctggtaggaactattttttctgtcttaatttattgtggtttagctcagatgaaagtcatcagtaaggtatttagtcggtgggaattcacatatatttactgaaaactctacctattatggaaatataaaa

SEQ ID NO: 160 - DNA, 397 bp, Homo sapiens
atttacaacatagcataacctagatataaaccagattgtaccaacccatggatcagcaggctgtcacttcttgtttcaacgttttgcactatctaatatattgcagaagacagtatctcaagtccacttctgaataacccacacttgaatccaacctttcctgtttgccaccttatggtctcaattctcagcaccaaaactggccctttcctgctagtcaccatttcccatatcataactgccccaggtagttgcagccctctgcttcatcaagtgttcaaagatgtcttgcttcagtttcccccacagcacctcatatatcaggcttaccaaaagttttagcatattattagagtattgttatagaaaaaaataaaacattaaaactgtttaccaa

SEQ ID NO: 161 - DNA, 282 bp, Homo sapiens
aaaaacatcttttaaagtatgtttttttctgtgtcattccaccatggatttaagcatcttaaggtaacatctaattaataacttcctaaaggcttaattaataaacagatgtaaacatcttaagacataactaataaataattatgtaactctaatttatataacttcatatcctccaaacagagacacattttctttttatgtggccaagaaatatttacaaggcatgatgaatataatagtccatataaaataatcaggctgggcattttggctcacgcc

SEQ ID NO: 162 - DNA, 540 bp, Homo sapiens
gaccagattagaaaaagagatctgtgcctgatacgtgtctgatacaacctcactgtattttctgaaatctataaaatatgtgtttacctcctcaaaaaaaaatcagttaaaaaatcaatattacagaaggatctcttttggtggttttcatggattctaaattcagcatgtatgccaaaatttaaaacagtaaaagttagccttggaaatccttagcaatttttgggacccaaactggtcattttttccactggtattggaacagattatgtttctttggaccagcactacatttaatagttggcttgcatttaggtaaccttctgtttggaaaatctacaacattaaacattgagctcatattcatcgatctgagtccccaggatgcttagaggaactgaagacgagtagatattttaatcccttatctcaggctcaccccagaatggactggtagggagatcgagcatattatttgtctttatcccttatttttccatgtctaattatgtggttataaatgtagtacatgttatacag

SEQ ID NO: 163 - DNA, 228 bp, Homo sapiens
agtatttttatttgaaaaccctacatggggcatctcaaagtctggatggggttgcaggaagcaggtgggggaagcaaggtagttgccagaagtgccagaaacacaaggggtcattggcagaatttgagtccagtgctgggcagtaacaaaggccaggtcgtggaatcctgttctcaattccaaggagtgaactgaggaccagagtgaaagttgaagtcttgaatcaag

SEQ ID NO: 164 - DNA, 453 bp, Homo sapiens
tgtctgatagaagttgcagctagaactgattggtggctgttggccatctgagttttcatagaactgctcaccatggagccagtctgcagccaacacatccaacagaaaccacagtgtgcccagcatcctggtgcaatgacagaatctaatcaagcaggactcacctgtccacactgaagagtatctatagcagtataatcaccacaattccaatgtggagattttcaaataccaaccaaataaattgagcaaagaattagcagagctggttctgtttatggcacagattgttcactgctacccggagcatccaagtaactttcctcaagagtgcaaagatcttctctcctaccatagccctatcttgggtccagattttctaatgacattttgcaaaactttgatcttgctaagaagaatctcactaatcttggtgacacacagcctccctgc

SEQ ID NO: 165 - DNA, 1327 bp, Homo sapiens
ttctttgtttattgtatcactatttcttcatttagaaactatactgtaagcagtgtgaatttttgacagcattaagtttgacattcacacaaagacatacccggtggccataatgatattcattatcatggaaagatgtctaaaatatactattggtgaaaaaatcaggtatcaaacagcatttatggactaatcccactgaaatcatagagttcattctttccttattttttgcatttttgcagtgcacatgtgttatcacttctctgccttttggctaagatcaagtgcggtgcacatgtgttatatttataatcataaaaatcagtaaagctatttccatcttaaagaaaaagatccctcactttgcaataatgagtggttatgcctcccggccttgtcttctttaactactagacaagattcatgccttggaattcctctgaacttccctactacactacattacaaggaaggcaatgtgggtatctccctcctccgtgacaacttaagagatgcaaggtcagggcacaggtcacaacagagagggacactgatggccaattctggggcctctcatcagttgtcccattccaggtttttaggtagagggctgctttgctgcttcaaggttaagcttgcctaatactcctctaggagctttaacgagctaagcacaaatcactccactgaactcaccaaatgctatgcctccctcagccttgcagactttcccaatccactgacatcactctactaagccagtccatcccatcccccctgttctgggagaatcctacataagctttcttcaagtggtctctaaaaccatttttggcctcactttattagaggagaaggaggcgcttgctgatatcagtatttcttaccaactctgtttccatcacagtaagtatcaggtatgctaaaagcatgtgtttgcctggaaaaaagttccttttacttagctgctctagggtatctctatgattttgttctgcaaccttaaggatgatataactaaaaagtaggagtatagaacatccccaggtttaacataagctgcattaattattataaccttccctcctcccagccaaataaaaaatcagactcagaaaccccactgatcttatgcatgttggtactcccacatagtttacttttaatacatgtctattagatatcattatataaagttaacattgcagggaagcttaaatgtgtcatttgtacaccatggttggatcttgatatgctggatattttttaaaaaggctctactacaaccaaagttagatccaaatccataaacaggtagataaca

SEQ ID NO: 166 - DNA, 571 bp, Homo sapiens
ttgcattctacacagagcacttaagttcataattctgtgagagaagtatttatataagactaaaaaaattatagtaatcaggagaaaagaaaaaagtggaaaatttgtttgcctcaaaattgccaaccctgggcatatttcataaagcttctacaaaaaatggtttacgaagctgaaaataaatgtgactgaatcctagattataaaaattaggcaaatctcagtctttggaattatctattatgtgctttttcacactgactctgggacagtctgaagttggtagtgtctgttaagctcctctagcttgccaatccaggtgcctggtaccttcccagaactgcctttttcatgtgaccctgatattcattcctttcccagtgctcttcctgggtaacctgaaaaatagccccaggatagtgaaaagtagtcttctttctcatccagagattaagtgcattttaagcatggtcatcttctaaaggaatgaatcatcctaatcaggaaaatctgaggcaccagaacaagtagttatattttgctcggaaatgcttttagggatactgaatga

SEQ ID NO: 167 - DNA, 355 bp, Homo sapiens
aaaaggaaatgcctttaggtgctcctttatattgttgtgagttttgttcccatgagacaggctctatagtatctggctcttttcctaagcactgcaagaaagctaaacacaggtcactctgccaggcctaccaaagtatgtcctcagtcttccctaccgcaacatcactccctaccaagatagcccaccccaccatctcacactgggaagattctgtttaagttttcttgaatctttagaaacaattttggcctctctgctgggggaaggagtagagaatgctgttatctggggactgatacttccgtttgttcagaggaatagctcagtggactaccattcttggtaatggtat

SEQ ID NO: 168 - DNA, 435 bp, Homo sapiens
ttagctgaaaagatataatttgaatacaattttagtgtaaagtcttgagtatttacgcgtttataggtatataaaaggaagcacagatttctgaagcctgtgtctccaaccaaaggcaaggatgggacctctaaaagcagaaatcacacattttcacaaggaaaaatgattgcttggtttaaacaaccccttggattgtcagctcaaagttggttggttacagtagagtttggcacagctgactgttatgccccaagtcagtttgttgaatccagatagtagaggcacaaatttatcatcaggcagctttcctactgactctgatgagctttctgaaaagtggttactttggttccatcttctggagctctgggttatacagtgtgcaaatctgaatgcacatactcaaagttcagcaaaaatttattttattct

SEQ ID NO: 169 - DNA, 1099 bp, Homo sapiens
agatacacaatattaaagggctatcttgtattatgctgtaacacagtgatttattaagtcttcattaatccctctcagcagttatatactggatatatactggatataatgtactgaattaaaaatgtgacattcttttatcctctagcagtgaagcagtaaaatattggtcagaatgagaatcatgggtaggtctaatcatgcaggaacaggagattctaaataagttgccaaagaaattcatttcgcattagattatcttcttttctaggcgaatgttatttaggagctgtgtttacataccaaataatccctgaattcaaggctgttgtgtgattactgaacatgttaaagagcttacttccttgcactgcctccctacaagatccatgtcaagtcctgtctaactacctgtacaaaacttgaggaggaaagtgggctttcagcaagcacactcttgggataaaagtagaaaataaaggccagaaatcatggccgtttcctccagagaaaataccagaacatatttaaactcaggggtggtatgctgtttctggggaatgtgccctgaggctattttgatacacgaattaggagtatctttagtgataatttcaacatactacatatgttctttataatttggaaaagttacggggagagtggagaaaacaggaagggattgttagcctagaaaaaaggttgaaggagtgaggggggatctaggggccacacagatagaccaagccagtttcatgagcttacctggggccaggttgaaatggttcatttgaaccacatctctgcctcaggttttctgtaaatttcattcattattgcaactggcttgccatcacctaattcaattcttcttcaatgaatctggcagtgtacttcttagaaacaacatgaatgatggcttaaaccagttttatgtcaaatatcccttcctggtttagttcatgttttgggggctctttttaacataagcagcaatatataccttttaagatatttagaagctttatagtccagtttaaattttggttaactagttatacagtttagattggcaaagcagatacaatgccagcataac

SEQ ID NO: 170 - DNA, 321 bp, Homo sapiens
ggttctagttagattctctgggtccttaatctgtctttctacatttagatttattccctatttggtgaagcatatccatcaagttaaaagtatgttacaatggcagaaacatggtaaggacagcggttgacatggctctctctcataccacactgccccaatcaggactgctgtgcagttgtcatttgaatatcacaacttcaccaccagcatggagagtcttttcctttttctgtgttgaatctcttattttctatattccgtattttcttatttctcagatgactctctcatcttagtacaggcaatgtgattgtgtga

SEQ ID NO: 171 - DNA, 519 bp, Homo sapiens
cctcgaataagtaaagcatctccgttagtggagatcccctaatagccctctgttctgggagacataccgagggatcattttaattaggtagatgtaaggaaacacaggggaaggttgtagctggacatgtgggaattgacaatgaagctcttttcatcattttctttggtacatgaagttcaaaggctgctgggagaaagtcagcaaattttcccaaagactaagcttctgggaaggcagttactgagacccctgatcacttcctttaggagggttaatattgctatatcacctctggactggaatggccctgacctgacgtggcagcagcaaaagacaggagaaattcgccatggagaggggagcctggactgcttacctggacttaacaatcctggcagcaacaacaagtttctagctcagttcctacaaattttactctagcatcacacatgtgtcctaggaaaaaagccctttgtgtttgtaactttggaaccatagattgtcagagcatttaca

SEQ ID NO: 172 - DNA, 261 bp, Homo sapiens
cagagcatttaaattttaatagctccatcctgcgaaaggtcgtgctgtagtagatattctgtgtctcaacagtgacaccttgtggggcagaggtagcagaggctgggggctgtttggactggagtagttttctatctttcttaaagtcagttataagcaggattgatcttttggactctgttcctgaacttaacatggaaggacaaaaacacgtagaaaacatgatgtactgtgtacacctaatcaatttgaatgttgagt

SEQ ID NO: 173 - DNA, 833 bp, Homo sapiens
tacacagagatactttttttcagccacatctagagagtggggtaactttcagaaattccctcaaaagagctaagaagcttccttctctgttatctctggcaaacctctttttacatctctatagtcagaattgggtcattttttttttttctgtactactggggcttgaggacgggattatgataatgatctaaggcctgagccacattcttatcccttaaggcttaagacaaagaacaaagagggagaggcgaggacacccagggtgagatcaggaggatactaacttcagagaggggtgaatgggtgaaagtatattggaggtagaagaaccacaatgcctaccagacagagcaacttacatcaaaccctttgaacttccaagcttgctcctcacatgtgtgaagaagtctgcataaaccactatattatgttgctgtttgtcaccacctggaacatctggacagagtccccaggataggatacaacttcctttccatggggccagtcacattctttgctgtcttgttccttcattctgcctttaatgagggtggggtcaataaagaaaatggcagtaaatttctctttagtttaatggaaaattcctctggaagttcacccctcattgatgtactccacttccttatttttctcccctattcttaggagccaatatctctgcaacaatgcttccttcttctcacctttcaaagcaagactttattcattctctgaacaacccaccccttccaaatagatcagactatacccctagcggtatatttctcaaaatttggagcctgttctgagtaatatgcttttcaagcgaa

SEQ ID NO: 174 - DNA, 355 bp, Homo sapiens
accactggagagcaaaattacccatttaataacaagtaagctagaataatactctgggggagactgtgctgggtgagagtagaggagttctcttatattccaagttagggtggagaacgtggggaactttatccaggtttcaccaaaaagtaaaggacaggtgaaggaactcacttctcttgtgagtcatcaatgaacttctttgctctcctgactgtgctgcaggggactgctgaatcaccatctcccaaggacaaatattaattttcatagagtacagcctaaccacaaggtagaagatacatattttcccatctgtccttctgtcctgtaattttacaaggccatctctctc

SEQ ID NO: 175 - DNA, 311 bp, Homo sapiens
atggccacatctcttataatgaggtatgacaaattattattcagcacagacttaatccacctatcttgcttccaaatgtatcttctttggatcatccctgagtaacactttttaaaattcccttagctactcacagagttggccaaagataagaaattattacttggaaatgtaatcccatagtttcttttttatgatggtggttgctgtgttacttggtacacagatattttgggttagctgatacaaaagtttgatatttcaaactcttatctttattgtggcttttagctacatttttttttctggat

SEQ ID NO: 176 - DNA, 640 bp, Homo sapiens
atctttatgcatagttttcttctaagaaactcaaatgtgttttatatgaagaaccactaataaccatttacttactactctctgctactaagtcttgaacagagagctaatgtatgcctaagggaaaaccgattaaagaaacgttcttatatagcttcaaaaacgaattaacaacgatagtcagggtgaaaggggaaggtgctcctctttaacttgaagtgcttaaacaaatattggattttagtgaaaacaggagtcttgaaatgtatccttaatgtccagatactcacaagataactttcaattatccagaattattttttactctatagagcaattcttccaaaatagtgcatagatttattctcagaagttatcttattcaagtaaagtgactctcatccaagagagacactggtagcaaagggcagtagttagttaaatagcagtgaaactgatattagagaactgccaactgatggaaatttaatcagcagtatatggaattggaatgggcttatacagggagtaattctgaatataaggtgttcagcagttttcgtttctttaaaattttttgtacaaagtggaaaaaacttacacacccatatttgaaaaatgggtaatttttctttcattc

SEQ ID NO: 177 - DNA, 793 bp, Homo sapiens
ggagacaaatagttctctatcgcatgttgtaaaaaatccagggcccctgtcccttaccattgccttttttccattccttacatgaagtgtgtcttcccaggtgacacgggagccatccttgatgttttttgtttcatcaagtctatttgggtgttcctattctatgcttcctcccctctagattcccgcctctacctcatactctaggtttatcctgagtgtggagtagggaagtgtgaataccacatttacattttccttttgttcttcaccttttctctcttagactgttccgctcagcaccaaaaggactttctttcttgcactgcaggaacttcccttacatcaaatccttatactgtttactctcatttattgtaaaaatactacagtcttctgaatctgacttctgtaagcctcttttctccttaataacaaagactcctccaaaaatcataagtgcttactttcaggctatcgtctccatgtggacttgaaacacactattttgaaactcaaagctgccttcagcagggttctctccattcgaagaggcaactatttccactggttcaatcagtggggttaatgataggcccagaaccaggaattttcaagaaggaaagtccactgacttaatattctccaaatgtactcgttatgctgagaatacacactaagaacatatggcatttcattacataaatgaaaaacatcatcataagcaagtttggaagcagtgaaacacacccttggaaggcattataaatgctccctaatatctgattctccc

SEQ ID NO: 178 - DNA, 246 bp, Homo sapiens
ccatcagatagtatcaccttaatcttcctttggtcaatgccacaaaactaaccacatctatgttaactttcttttctccgccatctgcctcaacaaatgtcatgtccctcatctttctgatggctaatcactccctttgtatcctccctcctctggttaccctttctcctcttttcatatactttgcttcttcgttatcttcccaatgggtcagtcctgtcaaccaacctacaagacaccacccat

SEQ ID NO: 179 - DNA, 1771 bp, Homo sapiens
gttctttctacaaaacagcaaccagagacacaggttcattttcagttaacctactcggagaaaacctactttatcttatttaaattagggtcctccaagcgatcttaacatctcctaagtcccaagcaccctgtttttttcctgatactttttccgtttaccttaaggtctgtgtcaacctgacagtaagctgcacgatggcaggggtcttgcctactaggttccctgtgcacagcagcccgtcaacagtagttgaataaacatcataggtcacaataaccctgggactgcctcttggggaggtagccgcaaactctcgcaggtggcagtgacaccagtacttctccggggggttgttcgagtggaggaatactcttacgtgaaagtgctcagtacaccactgcggcaggaaggaggaagggaagaattccagatggggagaaagtaatattttgcagcacagtacagggtaaactgggtccaggtgggcgtagccgccgcgacaccttcacgtgaccgcggacagcttaaggaccccgcatccagtgcgcctgcgctggagctcccggaagttgccggacccggaacgcaggcggagcgcaagtctgtcagccagtcagtccgccagtccgccagcccagtacctctctctcctcggccctcgtaagctgtccgcggtctgtttggcccgaacggcggcggaggcgctgatcatggcgacattcatctcggtgcagctgaaaaagacctcagaggtggacctggccaagccgctggtgaagttcatccagcagacttacccaagcggcggggaagagcaggcccagtactgccgcgcggcggaggagctcagcaagctgcgccgcgccgcagtcggtcgtccgctggacaagcacgagggcgcgctcgagacgctcctgaggtgggcgcggggctgggagtgggtaggttgtctgccagccgtcgctcgccgctcctcttcccgtctccccccttccttcaatcctgtaacctgggcggagccgccccgtcccggcctgaccaggcgcgtaggtgtggtctgcattctttgctggtgagcaggacccgccctgcaggcccgctgtgactgcccgcttgtcctgcctgcacgtctgctctagcccttggtcggcgagggctccgtggatcagatacctgggagcagcagtctgccctgtactgatctcttttgccacatttacttagaactagtcttcacttttttgggtctctaactgaagcttcccctttcgccccatttttccatcactgtctttcttgggccacattttgatttcataatagtagttgcttgaaggcagtgggggaagtgggggaattgggacactggaccaaatgtctgatcagctcatcacattgtccacatgaaatggaccgtcttcctcagttcaaaataatcaaatgatagatggagaattctgaaagttaggagctacaactatttgaaataaaactctagttacatagttgaaccgttcaaggtaggttgtttaaaagcagtttgttcacaaacagatatatacacagtagagtaaatttgttattttagcaaacgcttatttagctcatgctgatttaatgagggttcctttcatgatacttaatagttataagaacattttttacgattttatagttaaacatttcttttgcataccttgttaatctcgttttctccgtatagtatattctacttgtttcacaggagaatcacaattgtattccaatc

SEQ ID NO: 180 - DNA, 1309 bp, Homo sapiens
gatcgtcttgcctccgtgatgcttccctcgaaagctttgttcatgtattgagagggatggctgtagtgtaataacaatcgtccgcaacactcagtatcttacagaagggagtgcttttctccttagctctggtggaagtccatgggaggctcctgggtttgtttgcacccatttatgatggtgggaaatgggctaagttaattgcccttatctgagtcatccagccggtttaatttctccttaccccatggatcaaagcaagatgagtccggactggggaagggttggttctccgaaggaaggggtactgaatagattgctcagaggaattaagaccccttggtgtcaaattttagagctacaactgttgggctgcaaggatcattagtctaatagcataagcattttttttaaagttaacctagaaatacttagccattctttagaattaacataattaaacaatttcaaggtaatttttatgtaggcatgaatagcattcagtgaggattttccattagtaatattaagaaaacatagttgtggtataatgagccctgtgataaaaatcttgttgaatatatcaaatttggttccagccctcagatttggggtcttcagaagcacttggtgcatgggttttaagctaacagacatgggaggttggtggataatggtttggatacggttctcctgtcaactttaaaacttaattcatttgttccttcctttattctttttaccagacttaaatgtgtgaactgttcctaggtagtggacctgttgtagatatagtctctttgaaactaaccatgtttctttagtcacctctgtataatcccctcctgccacattaattcaacaaatattaagtattttcactttttgggcttctagaggggttagggtaagcttggagatattactaaagtttataatggaggtaggtacaaaagttttgtaggtatatacgctgtaaaattagatgtgaatcagttgtgtgatgttcattcaaatccggcagaatatcttatttttaataattatgtttggataattgtgtaaacttaacattaattttttaacttaatgaactttttaaactaatgaactttgaaaaacagagtttaaactaattcctaaataattgaagccagcttgataagtcctgatatgcagctccatatattgctccagtgatagacttgttttcttattactaacttgtaggtgttctattaaaatttcctaaaatatacatttatgcatattataataatgagaatgagtacttaaaaactcatttgtt

SEQ ID NO: 181 - DNA, 265 bp, Homo sapiens
gaagctccagatataccatttaccagcattgtgtaatttcttttgtggtgatcagtttctttagagagaaagcttctagtcttccatgaaaaagtctgcttatcagctttctaaattttatcctggggaatggaggttggggatcttaacaatcatgtatgcagtctatcaggtacatctatttttagtatgacacctgcattagggttaggttcatttctgtgtggtagatcccaaattatctgagttaagattttattttgta

SEQ ID NO: 182 - DNA, 573 bp, Homo sapiens
tttatacttttttcattaggtatgttgcaaaaatcttccaatctgtttcttgtctctcaactgtgtttattctatcttttgtcacatggaagttctcccaaaagtgttgtcatctcataatctgtagttaacattttttttcttattcctaatgttgtgcatgtgttatgtgtgattttcctccctcagatttgccaaaggtttggagccaccttttctttgtttaaaaccaaggctttttggttggttttctgcccttgtcattcatttttttaaaaaatgttctttgttccttttttctatctttttgtattgattggttagttttccatctttttggtttttctaatatattttaggactgtgtatttttttctcagtctgtattggttgcatcctactgactttttcatttgtaaaatgaagttgatggaatactcttttaatttctgaaatattttctacatggtagtgttttatagatcagtaaagaaaatgttctgttttacttcataactgttgtttggattctcgttgttggtttggtggtgaacatactctttgcagaacttt

SEQ ID NO: 183 - DNA, 327 bp, Homo sapiens
atattgagataatattagcacaatgacgttgctacaatttgttaaccaaatactaatggagagtctgtgtgaaccatactgtaggagacaatgtggaggatataaagatatacttggtccctggtctcaaggaatatctgtaattggcagacctttttggctccgtaattttattccacataggtgaataaacatatgggaagatttaaaatctgatttgtttttctgtgttttgacttttctggtgtttagtaaatcttatcaggactatcatcattctgtgtatctgtaagaagaatcttctgaggtgctttacacaggagattt

SEQ ID NO: 184 - DNA, 812 bp, Homo sapiens
acattataccttttaaatatatttgggattttatagttttggttaaaaaaattcgcttatttctaaaatagaatctatgaagacaccaatttttttgcaccattattttccacaatgtgctagtttttgccaactcctggcttagcatactggctttccctgtgcctacttatacaaaacttgcagcctaggtctactttgttagagatacatcctaggctagagtctgctgctatagtaaagtgtacttaaatgttaaagagaagggtgtggtagattctcttgtttctgtggattccctatctagagaactttgatgcttgtgatctgggctgaactatgagggataataccttgtggaattatattgaaggagtagcttatggtagttggatctcctggaacagattttgctcatggtaactgcagttagcaatggctgctttcttttgtaaagcatttgttgatctctctcattttgttggggttttctccatgctgatcagacattgttgatttccagtgattgccctcctgttgtacttttatttcaacttctataatctgtcctaagatagccattttactttgagggtttcatcacatagcttctaatcattcagttacaggatataaatgccctgttccccccatacagctcaggttttgttagttggcctcaaaaactttggggtgaagagaatgggtataaaaattttagtgcattcagtttagccattcttcttttcctcacccatttgcagaggaagtaacctcatttcctactactcccttccttgtttactttatag

SEQ ID NO: 185 - DNA, 467 bp, Homo sapiens
accactccagtgggttagcattgtgagtgttggagaactagcttagctgtttgcctctgttccattctcccctttgcttctagctcctgtcaccctggccagtggccatgctttattgctgcccagacttactgtggtgctgcctacaccagagtaaatattctgcttggcgttggcttggcactaaatggtataatctcagtctggaaattggtgactcagcaaattatctcacctacggccccctggggcaggtgcccacagtagactctccctgagaattttgatctcattggggtagagtaaaactgaccatgttggtcactcctcctgtctccctatggctcctttccatcagacaggtactttttctttggagaatgtctccaggatggcacctgggcagccgtgtgccacaattttgggatggcccaacctaggcaaaaaaggtacagggcagggcaggg

SEQ ID NO: 186 - DNA, 239 bp, Homo sapiens
accaaactcatagccatgccagccaaaagcttggtctcagatatgttgcccactcctgctgaaaatttgcccccagaaataatcattacaaaaatacccctgatgaaggggtgggggaagtataagggaaaaaggaaaggaggaaagattagaggccagttagaaagcttggcctgacccttttctcctcctttccctgccagacttgctgactgacagctcaccctgatggggggaag

SEQ ID NO: 187 - DNA, 1026 bp, Homo sapiens
gcttacccaaaacatttaaaagtcggtaaacctgtttttaattggcagtttaccagagatactaatttgtctaatggatacaaacttatttattttagtaagaaatagtatttttaagaaatattttggttttcagagcagatgttagtttgcttttagccaataacagttgataaatatttttctgtggtggtgggtatgactttttgttcatagtttttcactgcatatattttttaagcttctggtttacgtattaaaaaactttttttcatataaaatagctgctcaaagtaagcatgaataatttttgtatcattttaaaccagttgtaattacataaatgcatgtaatatttagctctggtaattattaattctgctctattttttagatattatgatcagatttgttctattgaacccaaattcccattttctgaaaatcaggtaagtcattaattctgtcttaaaattatatggtaatagcacccatttccttctgccaatatcttcactgtctttagagttttatgagatagtgttataaaaataggagcttttagatctgtctaatgcgaatatatgtgcttctgaagaaagaatctcctggaattctgttcatgtcattcttcagtcacttctggggctcatgtagagcaatggtttgtttttctttggacttcattttatgtcagtaggatctgttgactgattaatctgctgtgtcctttcctttgactttttcagaattaggaaggaaactgcacaattcaggaattattagtctcagtttatgtgctttaaaaattattcgcacaagttacatttgcatgtaaaagttgcaaatgctgttttgattaaatgttaattacatgaatgtcaactattttctccttaaaggctagatgttgaaaatgctgataatttcttatagttttattttggagattggataaagattttaaaattagtgatacttttaaattttaaaatagttataagaaaagtactttaaacattcttg

SEQ ID NO: 188 - DNA, 624 bp, Homo sapiens
taaccattctcctacttttgtcatcatggaatagtttttaatttcatcttctaggaaacctgtagtacttacttttatttcccttgcttcacttagcttatttgacaaggatctactacttattttgttccgttgaagtcattgtgtgtttataaagatgaataagatagtgtttatgattaccaaggcagaatgaccatttgaaatatcccagtgccagtattttactttttttagatttcaatttaaaaggagaaggaaaggaagttgggtggttataggagataatattttgagcttttgtcctttttttcatggtggatttttcttcaaagaagacttaatatttaatgagattcaggaaggttacctaattttctgttttctttcattctatccagatctgcttgacatttacctggaaggatgctttcgataaaggttcactttttggaggctctgtaaaactgggtatgtaatttttaataaaagtgataggaaaattggtctaactactttgcattgtttttagtttttaaaattgttatcctaatgactctttgtaaatactaaagttttttacatttcattctctttttagcttcaacttttaatgcaattttg

SEQ ID NO: 189 - DNA, 333 bp, Homo sapiens
tatttattcctctttagtagaaaggttgactctgatttttctgtgttatgtctgggtagacatttctctggcattttgaaataaaggatttaaagctcagaagagaaagatatacattcgggaacaattattaggtgataataaatttattccttctggcagataattgactgagaaaagtatcaaagtcagagctaagtaatataacattcaggggaaatagaggaagaggttctgggaatgaggttgagaaaaagctttcatatcttacaggaaccagggtaaaatagagatgtgaaggaatgccagaagagtttcaaaggtgatgtggtc

SEQ ID NO: 190 - DNA, 343 bp, Homo sapiens
aataaaaggcctgccttagttcagagttgttgcattgtacaactctagggtccccggaattgggctccttgggacactcctcatacagaactcagagtaattcctcctccctcgagttgtgcactccaggcaactcgagtgtggtatagtatccactttgtgaaaagttatgtgtgtgaatgtttatgtagttatttgtgagataccaaaaaataaattctggttaactctggaagatgagatgttgggtgatttttaattatttttttgtagtttagaaaaattgtttgaattttagaaagctgttattttcatgagttattttcgttttgaaaaacttaga

SEQ ID NO: 191 - DNA, 339 bp, Homo sapiens
taaagtaggttagagtagctggtgtttatgtctgctttagtttagaatgaggagactagaactggtttggaagcaagttgaaaactggcctttattacctaggaggccaccaaagtactgtaacaaggagggctttactttatggtacaactctgtggcacaaacatacaaatgtagtgttgttctgattctcctagattggtttgttcagtgttttttgtaaggagccttattttgcctagtggtcaatgccttgcacattatgcaagatcttgaattccaaactgattgaattctgtgagtaatagggagctattgtagattcttttttaaaagtta

SEQ ID NO: 192 - DNA, 838 bp, Homo sapiens
tgtagattttttttttttaatcagagttgggttttagcccagctaacctgctagccctttgagaaatgtatttgcatgagggagtaaagcataaggccagctaggaggtaattgcattgacttagatttgtggtaatgaggaattggtttgattgtggtgggacaatgtgattttgagaggtgacagaaaaatggaaataatttattcaaatttaagaaactgagagaaatgacatgaaaatgacttttacatttgaatttgattgtaatagaaatgtggaagtaaagggaaggagagaaagaataacttactgttcttcagcgttttgggtgatgggaatattgttgtggaaataaatgcctgtaagggcagcttgaaatatgggagcatatgacagcaagaaaacaggtctggaaacttgtttttgtgagagtcagcgggatgagagaggtcatagtatttctctttgaaacatttgttttctttagaaaaaataatctgatgaatttttccttctcaattttttacagctcttgcaagcttaggatatgaaaagagctgtgtgttgttcaattgtgcagccttagctagccaaattgcagcagaacagaacctggataatgatgaaggattgaaaatcgctgctaaacattaccaggtatgctgaaaagtagttactacaataatggtcaacactaaattggattaagtggaaaataatttgcatttaggtttatagatacttcttacgcaacagatgttttctaaaacgaatgcacttttaaaatgaatttattcttactgttaaagcccttagataaactgtctatagaccag

SEQ ID NO: 193 - DNA, 295 bp, Homo sapiens
tatgaaatgtctgagatttcatctcaggcatttagggtaaatccattttaaataaattacctaattaaaaaaaatttgtacattattttcatatgttttcttagagtgagacacacttgaaatttcactgttgttacaaaaataaagacaagaaattggcaagaaaataaaattttaactttgagacttgtggagaggtcatatttaaatatggtcagacacataatgttcataagttgcctaatctgttttacgtactgatcatttactaatatggcatgttattttgtggcag

SEQ ID NO: 194 - DNA, 250 bp, Homo sapiens
gtttcactcccaaacctcccatgaaatttgcttgtctcagaggtagtctgctttttcccgttgtttatgtttagggaagaggtgagtgatgctgttctgagaaagtaaaaggaaaatataccgtaagcaaacaacacgctccaaattgtggcttgccttacagttttgaatgggcatagatgacaaacataatgcatacgctatttctttttgaggctatacatggcaaatattttaaaatgtgaaaacg

SEQ ID NO: 195 - DNA, 1059 bp, Homo sapiens
aactcatgacaccttttaatcccagactgatttatttctttttcttagtataatttgtttcatgaaagcaaagttattttagtattaacaaaatataattgagatgaaaaatctgatggggaacatttcactagtgagctctgaaggccagacagaaatcactggcaatgggtagtaatgctgttcctcagaggactaggtgtatgtactacctggggtgtcccctaactacggcatgtttaattatttgaaagatgaatttgtttgggaccaaagcaagagcattgcagtactaaaaatattttaatgtttatccccgcctctattctcatgttaattttgaggaagtatatctaaaaatagtttaatcagattgttccattagtttactttgtttttccttgtaatttacttttaatctttgttaaatctcttgttacgctatagagttttagaaagataaccttattgtctgtaggtcagatgttttagattggttttgcataatataaaaatttaaatatattaactgttcactgagttaacatttgaaatgacttttatatgtaacagtaggaaattaagtcttgctgagttcctataaagaaattctttttcccccctttagtttgctagtggtgcctttttacatattaaagagacggttttatctgccttaagtcgagagccgaccgtggacatatctccagatactgttgggaccctcagtcttattatgctggcacaggctcaagaagtattttttttaaaagccacaagaggtaactccaatttatctttttgttgcatgtgaaaaaaagtgataaggcttttaaattaagaaagtgattagaatataatatgttcaatgtcgagctgtccttcttgaacttgatacatgaattatggaaaattttcagctatccttttctgaatttgtggcacaaatttacatttaagaatgtaggctgtgtttgaagtcatgaaatagatctttagtaattgtctttaaacactccattctggaatagtatttatgtatgtttttaacatgtcaga

SEQ ID NO: 196 - DNA, 1761 bp, Homo sapiens
aattttgtgcagaaaatgtgatttcatcaagaaagatgttttcagatgcgtgtacaaacttgtgacctcagtgtttatactgagacatgtcagattagctcatatttattttaattataatggtcatattgtattccagataaaatgaaagatgccatcatagctaaattggctaatcaggctgcagattattttggtgatgctttcaaacagtgtcaatacaaagatactctccccaaggtcagttattgtttttataaacacttgcttactttgcatgtgaaatatttagacttttttgtgtataagaagcaagttgaaacttataaagaaatttgaagttttaatagagttatctgaagtatatagtagaaatagtttttttttttttttaatttaagatgcatgaacaattcttttatgtttaggggatgcctttgtctttaccttttactaaacttgtttttccaagctagaactctttctggaaaatgttgaccatctgttttcaatacttttatcaaatcaaggcattgtgtagttctgaatcattggtgatttggtacaagcatgtatacttgagcatgttgatgattcacacttttaattattgtcctgttttcttaaagatgagccttaaagcgcaaaaacagacataaagaaaaaaggaaaagaaaacttaacaaattcatctgatactttgattagaattcagttttgccaacagggataaaaaattgggctgctaatggacagctaaggaaagcaaccatcttaaaccacatatcacaggaagtataatgttttaatgtaaacctttctgaagtgacaattgtaaagactattcagtgatgatcatttgttaatgacaaagcaaatcactagtaaatttggaatgattaataaagaaaacttaaagattgagtgaaatatatgtttcaactacttccttcagaaatgttcaaggaattagtttcatcatatggtatctgttacatgattttttttggtaggggaatttattgatttgtaagtcatattcaggaatctttgtacattaaaaaattgcagacaacttgggggtgaagtaaaaatgcacataagtgcattaacagtacttattactcagaaaatgatcaataaggaattaatgtgacgattcctggggatttaagatacaccaagagcctagtagaaatttgcccaggattcttgggtattaacagccttcctcttaaaaagagacttgggatctcctctcatgtttttttcatctgaaagacctcatgttcagctgcacagtgttccgttacatcctgttgggccattagttcagtcctgtcatggagagaagaaagtcacctacaaagacttggaagctacctctgcagcattcctggtattccttgaaaatctcctgtttcagaaccaagttgctccagccttaccttgagaactggcatgagtgtagtttgaaatttagatgtcttttattttttcctttttactaataaagctcataaggtattttcatattctagttataaaactgaaaagtctgcaagtagtgatccaggaaggtaggaaattattccctgggagacaggaaagcacacaaggtagtaattcagtttttgattctcttacattttttgtttagatagtgattgtctagcctaattccttggatttttttaatatcatatacttcctaaaagcagtgaggttacaggttagattttgacgttttggaagagccac

SEQ ID NO: 197 - DNA, 1644 bp, Homo sapiens
cactagtataattgctttcctgctttatgtctttggatcttttgaaattaattttgactggaattattttcaaaacaaataggcaaaataacactttatcattatcattggtcatatacttagtgcatttgtctatgatatgtttttgagtatatgacactgaaatattagtgtatctatgatactaaatcatttttatatggctaaaatcatcttcagtaagaactctcttaggatatgaatttaagtgaaaatttactgtcttttttttaaaacatgatgaaacagtaatctatagagcaatttcattagtatatgtgagtaatgatggtttagttaactctacaggctgggtaagggctcataagaaagcttctaaagctctgtgctttgtgttcctctgtgaatgtccattctacttctctttctaataatgcatgcttttctttttgtaaacaaaatgttgacttcatggatcaattaaagagaattgtaaaaacctaaattggcttcagttaacagttaaaaaaaaccccttcaattggaagaaaaaaaatttaattcatagatttcaatccacacaaaatcatgtcgtcttctctgtttacacctaatgactaaccttaatctctaaaccattaatggggtgattctaatttctgtcttcttttcctttttcttcctgcatcccatgttgtctgtggtggtttgtgtggttggactctcccctggtcagtatttttatttccaggaggtgttccctgtcttggctgcaaagcactgtatcatgcaggccaatgctgagtaccatcagtctatcctggcaaaacagcagaagaaatttggagaagaaattgcaaggttacaggtgagtctcttggtaataaatatttaagtaactaacttggatctctcttttttttcctagtgagatttccaagtttgcccataaaaacctttcccgttcatcacccctatcagcagggacaagtgattgtttttatctttagactttactgcatgtttttttgaggtctcatattttatctaaaaaatagatgcaaaatttgcattcaattctcttttttatccatgtttattttaatgtaaaaataattctaaattaattgccatctccagattgtttttgtctttagactttactgcatggttttttgaggtctcatattttatctgaaaaattcatgcagaatttgcattcagttctcttttttggtcatgtttattttagtgtaaaaataattctaaattaattgccatgctccaggagtatgtgtagtgtttaacttgtggcctggtctttgtctaaactggggcatatacttccacaacttgaggacgacagtggagagatgtgtgtgcatatatatatatatacacacatatatctcttgtgaacagcagagtaccttctatgcagttgtgttcatactgttggcattggggttgtcagaaacttgctgtgacattatggcacctgaggcaacttgccagcaggagcaagagctgtttgtatgagttgtttgtgttttgagtattggtagacagaggatagaaagatgacttatggcatttgagttagggaagtttaaatatgtactgatttttagaagatactatgga

SEQ ID NO: 198 - DNA, 471 bp, Homo sapiens
atggaaatgttgtttaggaggttcagattaattaattagccttttcatgggaaaggatctcacagtgaccaaatcagagaaagtctttttaaaaaagtcagacccagatgtgtctggggcttcactttgattacagtaacttagatttatatataaaaatgattctgaacaaggaatttgtgggaaggattctttttttaaggctagcatatttaaattgtaagtttagtttctttattttctggtttctgggactattagatttaagtaagcccatatttagtctctataaatcagtcagagaaagaactccttttgaaatttaatctcatttttaagtacccctgaaaaaggaaactatttcagattcacacaatgggagggaggtaaatacttttcctcagttatagacacatagattttgcagctttagttttacagctttagttataggttaaagttaagacagaa

SEQ ID NO: 199 - DNA, 488 bp, Homo sapiens
gttaacacagaacacactcactgatccatatttcagaggacagttattctttccggtaggcatgaaatattttttaattgatttgcactcccaagaagacaaacagaacagacaagaagttgaccaataaaccatattcgctgtagtttctcacttagtagagaataataccccatgattctgacggagatcttaggaggtcacactattaaaccaactttctagttatggctactagcaaagagaaataacttattggtcctgtgcaaaccagaaatgaaaataaaatcacaatcaggaaaatcaaaacaatagataaaatggcagcaaaggtaaaataactgcttggaatcaatcacttctggggccaagaaaaattgtacctgagcttaatacagctcatgagttgcacttcttgaacagtgcagtttatgtggccccagaagatggatcttcttggtcatcttggtggatcttcaaagatgatg

SEQ ID NO: 200 - DNA, 961 bp, Homo sapiens
gagatgagttgacttttcagttacttaggtttgaatgagattgattttgctgggggttcctgtgcagggaaatgggcaggggttagctttacaagcatcattgtgttaagggctccctcctaaggtccacttctctggctcttaaagcctaccctggattaggaagaatcccactacctctgtacctgtgcttccctgaattcctcacagcctttgcatttcaagttgatgcatctacttttagggtttatattttgctggcattttctgagtgcttatgccctttcttctccctccctacttttctgttctctctttctgctccccctagcaaccctgtctttttagttaatctgtctacttctttttctcaccagctctcttgggatgaggcccctcagcatcacatttttttctgtggtcccctggtggcatgataggggccagttggctttgcctttaccgtcacctggcaaggttttctcatcctgttttgttgttttcagatttgcttaaagtaattttaacttagggtggcacccttagcacttccctttcttccccctctgtgtatagcgtacctacggttctggtactagtgtttgctatttgggggagggttcaaccacatttacaaatcaaatttgatttacaaatttaaaaagtgatttaaatttgtgcaatttcccgtttcctagtttacactgaagggtagcttttgttttgttttggttatctttctctaagcatgataccagctttggaggttaagatttttatcatgttaaggaactataatttctattttacgaagattttaaaaaatcaagaatattgaattttatcaaatactttttcaacatctatggagaaatttgattttttaacttattattttggagaattatataagtagattttctagtattaaaccatttttgtattcttgttattttggtgt

SEQ ID NO: 201 - DNA, 641 bp, Homo sapiens
ttcagattaaagattttttttttgaaaccaatgcttaaatacttggtggggaaagagaaataaaatcacctccctcttttttttttttgttgttgacgtttttctttttagcatgcagcagaactgattaaaacagtggcatctcgctatgatgaatatgttaatgtgaaggatttttctgacaaaatcaatcgtgcccttgctgcagcaaagaaggataatgacttcatttatcatgatcgagttccagaccttaaagatctagatcctattggcaaagccacacttgtgaaatctaccccggtcaatgtacccatcagtcagaaatttactggtatgtcagttattcagacacactttaatctcatttttctctagtttactctgtttttcctagctaaaaatcacataattgctgttgtatgctttgaatataatttgtattcatgttgtttaaaatgaatatgagaataaatattgtgccagtgcaatgttaagatggaaagtaaacaataataaagcatatgtaaagtatacaatagttagaagacttgaaactgtgtgtttgattaagactgtagcacttgtcattttgttaacttttgttatttaagatgctgccattaaaaataaacaaatat

SEQ ID NO: 202 - DNA, 163 bp, Homo sapiens
tatttctttaaacatgtaaacttctggagtggtatttgtatgagataaatacatgttattatattgtagatgtatacaacagatggtagcctctagctgagattccaaggagaatattctgttactgggaaagggtgattatatgtttatttagcaaacacaa

SEQ ID NO: 203 - DNA, 789 bp, Homo sapiens
cctcattcagtttaatcaacagatgaacagtgtcactgaagatccctcaaactcagtgatgaacacatctgaaaaagaaagaaaattaagttcaaagaagaaacttttcattgttgccgttgtccatgaatgtagtgatctaaaaattctctttatcattgtgctttaaatagtgatttagttttgatctttaaatgtcaatagacaataaatatttatagactatgtgaatattggaaagaaaatataaacagtcacttttacagttcgggtttttgtctaaaaattttgttgtaatttctcttcctaattttagatctgtttgagaagatggttcccgtgtcagtacagcagtctttggctgcctataatcagaggaaagccgatttggttaacagatcaattgctcagatgagagaagccaccactttggcaaatgggtaggtagagcttaattttagagcctaaagttttccgtttggttgttctttagtttatgaacattttagtttctgagcttagagctaaatgtcaagagtatataaaatagaaaatgtagacacacacttacaactatttttgttggacactgtatttatgaagctctagcaaatatagttggaagaaattatagaaacaaggtgaggatatgaggactaaaaatttgtattttaagaggtatttatttggaaatgagaagtagaaatgaactcagatacatggtacatttagtgttctgaaccaatttttgtttctgatggactgaatactaagaaaataattcattgg

SEQ ID NO: 204 - DNA, 523 bp, Homo sapiens
agttttgattaatgcatggattttaccatcatttttctctaacaagaaaggaatgtaagtttactctagcatatgataaacaggcagtctgagattttacagagcttattttctgaggagttcattgtattacatcatttcatttgcctttttgtcgttacatagtagatagggatatgtacctcccttcgccatcatgtaactgaaataactgaggaattgttattgtgctacaaaactgagaacagatgaagattctgtaatgaatacttagatcatctattttctgttgacattttgcctagatgatgtgaaattataactattgattctgttgaaagagagcaaaaaagaaaaaaataactattttgtgtattgtttctgacttgttagagatgctgtaacaatcaaaagtataaaagactgcttttttaggatagaatttttgacttttaattacttagactgaaagaagtttgaactgtaagccgacgatacctaatatattttaatgcggtcatag

SEQ ID NO: 205 - DNA, 724 bp, Homo sapiens
tttgctttgcttttaattgatagggcttatccagtttttctgggtgctaactccattgctgttgatttggttatagaatactaaattaaataaagtaagtattgatgaggagttaaattgttttagacttcagtataacatagtatctcattttttcagggtgctagcttcccttaatcttccagcagcaattgaagatgtgtctggagacactgtacctcagtctatattgactaaatccagatctgtgattgaacagggaggcatccagactgttgatcagttgattaaagaactgcctgaattactgcaacgaaatagagaaatcctagatgaggtatgttttataagatttgcttttcaagtataaacactgtgatcccttgatgtccagcagggattgggactggagacttcctcatgctagtacagtgtagttagtattcatcactttggtgaatttactgtggcccagagccttctctttagcataagagaaattctggttgagtgagaatgggtttcattcttatcttaagggtaagtaagtacacactaatgaaactcaaatgaccactgtgtaaaactagtatactgtgagaaatcaactgtcatacaaactgttcagtctttgtaattattgatttattttatgcatagcatgtagcaagatttttctttttaatttaatttgtcttaacctggaaggttaaaccctttaatt

SEQ ID NO: 206 - DNA, 404 bp, Homo sapiens
taaaaaggcattatatacctggtacctcctcaaacttaagaggttttttcctttcttttataatcttttaattatagtagtaatttatcttaagactttgtgtcacacagatagtgcggtttctagtcccaagttcaggcttttgatcaggaatctcagataatacttcttgttttttcttttttctttagagccaaggtccagacaggcatgttttcttttgtagggcagttttctgttttaaaaattcatccactgagaatcacctgtttggaagtataccagtttgagggtggagagtgcttttgatctgacctctcaccttttattgtccctacctatgtttcttgttgacttttcatgttctaaattcacaatccaagtcaatggtgaactacacagct

SEQ ID NO: 207 - DNA, 914 bp, Homo sapiens
tattctttgtcctaagctatcagggattgtcatacattgttggtgctagcactgtgtctactggtagattagtatttccttgtgtttctggccccctactatcctgtcatcttatctgtgcattaaaaaggcatttaaaaatatattaaacataattttctgtttgttgtattggaatgaaagtctaaattttatattttttaatgtaattgatcagttttccccttttgtttatggcttctatttatttattttaatcttaaaactttctttaaattgatatatggatgtaaatagtctcttatttattcctccttttttttttttttactgagaaaggtgatagctaattcacccttaaatttataagactttttgttaaatgcattataacttagatgtctgcaagaaaaaagtcgatttatattctaacctagtattcccatctcaccaaattctcacttatattgtgtatgaacatttattaaatgtattaaagtttttataccagaaatgacatttcagggttctttttgcttccttttaaagtcattaaggttgttggatgaagaagaagcaaccgataatgatttaagagcaaaatttaaggaacgttggcaaaggacaccatccaatgaactgtataagcctttaagagcaggtaaaaatgtgtataaatgaccttcatttgaataaattcccaatttcgacccacgtttttgcttgattaaattaggctcagttgtaaattcatttttaccgaaactgtttttcctcagttttagtataaagattaaaaaagttcacaaaagtaatctgccaattgtcagaagtacagatttttaagaaaggtatgaagtgaaaagttaaaatgatcctccaactttcattttctgttccaaactctgtgcata

SEQ ID NO: 208 - DNA, 1552 bp, Homo sapiens
cctgtgcatattttaaaaacataaatgagagcatattacatttatggctttgtaatttttttcatttagtagtgaatcctgggtggtaaaaaaaaaaatgagctttaagttattttgaggccaaatttatgcttcttaagactttgattattaagattttgtgcttgctgagataaatgctatcttcatggtggctggagattagttttatttatctttgtaaaaagttcatatattattgagatttttctaaaaatcttttttttttttaagtcacattgctcttttgacagaggaatacttttaaaataaatggaccagtttttggagagaatgatttcttcttcattcatgagttataggaaaagattaatattaattaacttttatttggcagatagtaaccaccaaatgtattttaaggtatagctatgcttttgattttataagtgattttgtcatctttctaaaaacgagaacgcaaagactgtcaggagctgtttttattatgaagtgaattggggtctatagaaggggaggataagtaaagttggagactagaactcaacatataaccagccgataaacgttgctgttagaatcacttctgtgctctgcaaacttttattttctcccagagggaaccaacttcagaacagttttagataaagctgtgcaggcagatggacaagtgaaagaatgttaccagtctcatcgtgacaccatcgtgcttttgtgtaagccagagcctgagctgaatgctgccatcccttctgctaatccagcaaagaccatgcagggcagtgaggtaagaaggacactttgatgtaggttgtcatctgcttaagaaaaccacattcaagccattttatataatgaactgccaatttcttattgtcaactttaaaaaaatgcagaaataaattggggttgttatatttaaagtagtatatagactgtgtaatagataattatactaatattaactgtcctgtaatagtaacttccatttattgaatgcccttttttgaactaaattttagatacttcataggtcaacagtatttaatttgggttttataaaagagagaagcttggaagtatagaaatttcctgaaatgaaaggactgggtatagccagatacacaaattctttatttcttacattattctatactcctttccaccttgtttcaccggaactacctttgaaaggaagattgacaaggtgtgcatgttaataaatggatagcaccatcatggtatttctactgatgacaggaaagagaaaattgaatagtagggcatctgatttggaaagtcctaaaagaagagaaagtgcaagtataatttaatgacctatcacagggagatagggtaagttagtaggaaaagatagaggtcccaaatctctgcacaggaaaacaagcgaaagggcaagaaatactgctgaaaacttcttgaaaaaagtgaatttcctgggatagtaagttttgaaaagtttgagttttgttccttatttgtctttccatagaagcattttatatatttc

SEQ ID NO: 209 - DNA, 1327 bp, Homo sapiens
aagaagtttaaaaatgtcacagggaaagtataggaagtatgttacgaggatttagatgaagtacttaaatttcagtaattttggagtagttctcttcagaggcttcttaagagattggcacattatgagaacagagtggataggcagaaaaagtaaacgtgtaggatcggagaagggctgagtagtggctgtgtctagagagttatccgaggtacagaggatctgcaaagacagcttttactcctgatttcttgtgacagaaggtttacagacatgttgagaatggctggaatctgtttgtttatttatttattcactaagtgtttgaaggcctactattccagaacagtgctgagcaccttggtccctaacataaagagacaaaaaactgctctgggttacctttagtgtagagtaaatgcacaggtactgggcacctctcaaagggaagagaaggctacatagttgaatgtgcattgaacctggatctaacgggggaacccaatggaacaaggaatgtgagttattgttttgaggacataggggagaaaaggaggtggtcagaagattaacttgtgaagaacaacgaacctgaagaagaaactgcagacccttcgaacagcaataaattttggtaccttttttattttagaaaaagatttctggttagtactttctttgtattctttttggtgtcttgtacatgactcagaattatgtggctttcgtcctttgattcttctgctttcagtagaaaagcaaaaatggtttgtgctaagcaaaatctgcattagtatgcactgatatattgctattttattcagttatatcagttttattaatccttacttgtgttacacaggagaaaggaacttttatagtcaatacgaagtaattttatggaagctagattttcttgacggggtaaccacaaaaatttcagtactctctgtatattcgtttgtcatgtgccttaatcaaataaggcaagcatcaggtttatcaaagctatttcagactggttataatagttgatgacggattttagccagaatttttatgataaaaactcagttttttgattgctgattagagtgatgcaaatgtacatgttttattaaaaagtccaagtttgatggtagggctgttttttcttttattgtgaagaagcctactgtctggttacttattttcagtctctttggacatctggttttagacattgagatactctgacaaattttgcagactagtggtaatttgtatttaaagatttttgtattaaatacctaggatcactgcttgtgattggttgcctatgatgtac

SEQ ID NO: 210 - DNA, 251 bp, Homo sapiens
ttgatgttcagttatactcaaagtgttacatctgctgggagtaatggagggggtacctttaaaaaaaaaaaccctttacctccttacaggtagagcataaagagaattgtttaaaactgtgtgccctcccagaggagtgccttttttggattcacagactagtggaggatctgcaaacacagcttttactcctgatttctcatgacagaaagtttatagacatattgacaatgactggaatctgtttgttt

SEQ ID NO: 211 - DNA, 698 bp, Homo sapiens
tccatctttgtcattgtctacccacattattctatttttgtgtatttgtttaatcctcccctttgcatatttatttaatcctctctggtccccaaatgaaggaaaagactgtttttgttagtagttgtgtccatagcatctagaatggtacccaaaacaaaagtatttgtttgaatgatcatcactggcagcctaacttaataaagggatacatttaattgcagttgaaaggtagctggagttgtgtataagaaataaatatgctaggattctaattatttatatactttgataacatgttaaacctcaaatttgaatttataagaaaatttaggcagtggttttcttattatcttggtcattcatttgtggaagcagtttaattcattttctacttcatttactctgttaaaatgaggccagtgccttataatctgaaatatgttaaactagtgtactgcatatgaatttttttaaaaagatgttcataatataagggatctctatctttgtgtggtagtccacaagttcgttcataaattcgttgtttgaaatggcatttttttttccccagaaagttagaattattgcatttttgaatatcacagaatttgttaactatttgaccctctctgtatcagtctggttggataccatggaagttgtggttagcttttcttcctaatctaagtaatatg

SEQ ID NO: 212 - DNA, 194 bp, Homo sapiens
tggaaggaaacttttattcacatcgtctgatatcaagttctgctaggtctttaaacagactttgtcatatccacccacgtatgattctttctcctcctccttccttttagagtttctgtggtttgatgctttctagactctaggaatcatatttctttctctttccacagccttctcccctgtaccctcttctt

SEQ ID NO: 213 - DNA, 527 bp, Homo sapiens
ttctgttcctttcctttccttccattttaaaattaggatgtttaggagatatggatgtaaacaaggccaaaaaggaaattcacctacatttagcagaaacctcgagtctctggtcttcacaaagggatgttactttggacattcctatcaaggagctaactaagactgtggaagaaagagtagaataggaatttttagaaacaggcagttggtaggggaatccatgggaattggaattgctgctggtagtgagaaagacaggggtggagacagggctcgtgatgtcctcttcttcctttgtctttcccccagttttctttctatgagcatcattggggcaagcagaatagagagattgggttgatgttcttggtggtcttagcaaagtatgaagagatgagtgaaaggggcagcttgaaagtgctcattagaaggcacttgaacactatgaatatgaaggggtatttatgaatcaggtgggtataggtcagagagtgtcttgactgaatacaagagataaatctctg

SEQ ID NO: 214 - DNA, 652 bp, Homo sapiens
atgttggctattgttattaatgctgcttttgttttaatatgagtcaactgaaggtacagtgtctatctatataaacctgacgttcaatttatatttggctctctgagaaatcatctctctctcagcccgaatgaacctttatatattatttccttctcgaaattggctttttttttttttttttttgcagttaaactaaggtgtcttttttgtttaggttgtaaatgtcttaaaatccttattgtcaaatcttgatgaagtaaagaaggaaagagagggtctggagaatgacttgaaatctgtgaattttgacatgacaagcaagtttttgacagccctggctcaagatggtgtgataaatgaagaagctctttctgttactgaactagatcgagtctatggaggtcttacaactaaagtccaagaatctctaaagaaacaggagggacttcttaaaaatattcaggtgaaatttatatatttaataagatctgtgttttaaaaattacagaaaagatatgtctggactaaacctatattcagttaggaaaatgacattggagaatatctgtagttaagagtagaacttaatacatgtatattttgtaaaattaaacttggcacatcagttttatctatgaaacaaagtcac

SEQ ID NO: 215 - DNA, 606 bp, Homo sapiens
agaaacaaagtcatttctatggctaaaatgttgcatattacttaggagtgcttgatacttcagatatttttcatggttccaagtttttaatagctttggttttttttccatatgggaggaaaatcgaaattagttggaattactgatacctttaattgtatggctaacatacatacagacttcagtcattttttaaaaaaataatgcaaagtaaatatgttgagaagtttgaagttagttttcgtgtttacagataggtagtttggactaacaaatacttgaaagtttgcccttttaatagttaatatgcaaaattaaacatatatttctactcctaaacattgtatctatatatgatataaaataactccaaaaggtaaaataattttcatgttatattttttacaagtgttatatactaatagaaatctgtgatcattattggttgttttgactcctattggatttttgaaatttttacttaagaaagatttaaagcataatgaggcttcaaaagagtgtactaggtattctagtaattttgcatatgtatttaattacatatgattttcataattggaaaagatcaataaaaatgttatgagc

SEQ ID NO: 216 - DNA, 1144 bp, Homo sapiens
gtaaatctttcttttaacaaggtctcacatcaggaattttcaaaaatgaaacaatctaataatgaagctaacttaagagaagaagttttgaagaatttagctactgcatatgacaactttgttgaacttgtagctaatttgaaggaaggcacaaaggtatgaagtacatgcaaaaggaaccatagctagcaagtacagatgtgaacgcatagtttggaagttaagtggtatttccagttgaaccaaattgctctttgcctagaattttagctttaatgccattgctgctgcgaagtttgttataggagggagaaagcttaatgaaggtggcaacatttcatgggaactttgaagaatgaattgcatatttcaactggcagaaaaggggtataaatattccaggtagcaggaattagcagagatgtcaatgacacctttttaagggataggaagttgactaatttgatgaattttgaggggcaggagtagtcaaagctgatttgtgatggaaaagcggaggggcatgacttttatgttctctgcggtggtttgctgaggacagacttgtggcctgcccaagtgtcagaaggcttactgaatatgtaagtactttcttgccttgtcctttaaaaagtttagggaattcgcttatatttctttttaccaatttgtttttgagggaacagtgatttttaagttttttcagatgcataattccttttggtacttaacttcataataatcactgaataaagttaccttgatataaatacagtaggtaaaatgtaaaaccctctgaagagagggtgaaaatactgcaaagccttccaaatagagaggatagtaaaatgccattttaatttggtttaaaatgctttgtttaaataggtaagctgagaaaaccctccagagagcctttagaaattcttttaagggtttctgaagtatgcttgcatttctgtagtgaatttgaaaacctaatccttccacttaaataggtttaatgttattaaacaattgacttttctctaggaattaggaaggttttcatgatcatgaatcttttaacttgttacattttttatgataatgttctgtaaaaatgcttttattatttttattttctttaggagtcttagatcat

SEQ ID NO: 217 - DNA, 901 bp, Homo sapiens
atttaatattaagttgttgggcctagtaaattgtataaatgtatctcatgcagatctcagttcttcggctctaactatcattgacaaattagctttagatcacattactctctggattaaaaaattgttcttgttccttacttgtatttgttctttgcttatagttttacaatgagttgactgaaatcctggtcaggttccagaacaaatgcagtgatatagtttttgcacggaagacagaaagagatgaactcttaaagtaagtctgttttgtgtaccaaattgtacttaaagaattttcttttaaaaaatcatgtagagacttttggtatgaacttggtagtatgagatagcaattttcctcttctcatggaagaaggaactagatagagtattttacaaagcaacaagtaaacagctgcataatctgggaatgaaaggatgaaaagaagcagaaactctagatgcaggaagtacagtgaggtcacagaaatgataaaaacagttcaggtggcagatctcaggaagtgccagtaaatacaagcaatttattttgaagtggcaaataggttccttacataaaactagagctatagaacatggaggagacagcatgaatagctcagagaataccagcaaaatcactttcagaaggaggctgctgagaaagcagggccagttaacatacgactcatttcctgctgagtaatcaatacagagtagcacagtgctgataaaaggtggaaaacattaacaaaatttaataaaacttcatagatgaagaacatttaccaaaataatattgtcacagaataggtgaaaattatgagcaaacatctgaccatgagctaaacaaaaacaacaacaacaacaaatgtaaggaggcaatcattctaaggcc

SEQ ID NO: 218 - DNA, 323 bp, Homo sapiens
tgaatttagtgtaaaagatcttcagccaaccagaagaggtggacaactgcccagccatttagaaaataaaagttatctttataccagagtaagttctgagtggaccaaacttgaaatttgtaaatgaaatataaggtgtaaaatagaatggaggagaattccgtaataaagctgggatgagcaggatctaataactcctacttaaaatccagaagccattaaaaaaaaagaaaagaataagtttctcatagaaatatgataaacagagtcaggatatgacaaattgggaatccaatatttgaaacttattcacaggcaaaagg

SEQ ID NO: 219 - DNA, 178 bp, Homo sapiens
caggtttgttgtaaacaagtatatattttatttacacttgtcaagtattttcagctcagtgattgaaaggtgaatgaaagatggaaaagtaggccatataataatattagcttttgaatatctgagagtttattttgttaaagtcgttgttaatactgaaggccaaaatcctttgaaa

SEQ ID NO: 220 - DNA, 1260 bp, Homo sapiens
tggaggctttgctttttaatttctgttttcattgaaatctttcatcagaagtttaaagcgtttaagaagaatgaatattttactctgagctttactttcttttgactaatggtttgaatactactgtcaggttgttgggcatagtactagtggcattttattttatatctttttgctcttttacattattgattttatttaatagcattgatttatatcttttataagtggctaggaaattatcatttgctctataaatgtgttatttactgcaaccatccctagagtttatcaaaggaaaagaaaggtattgtgttaaagctttataatatacgtatatattttagatatttcaaaatctggccttttagaattttgatattgattaaaaacttatttattttataagcagttatttacttaagaagtagttttgttttttttttttgatgaatgtatactagttttctttatgtctggagtgactggggcccttcttgagagggaaggttggatgcggacagtgtggggctttgctgttaattgttaaatcagggcaaaaggtactgtctcagatgttttgggacatgtcatatttacttctttgtgtacgttaatcagtgcagtgaaaagatgattgacatcatgtattacatggagtgcattttaccttaggtattgtttagtgtgattttgggataaatttcaatttactgttagaggagacagaattttctaatatttaatactaaattgtaatagtattttcagcaatatatctttcatgagtttatcttagtgacaggtgatgtgttatcttttaatataaaatatttcaacgccacatttctttgaatatcttcaggaagtttttatctagaaatttgcataatggtttgcataaaaggttagccttttcacctgttttattttgtataaacactgatatagtgattaaaacattagctacataactatgagtcactgtagttttctgataacttttagatagatgatgttaggagttttttaaatccagggactaccttttattagagggtgggcagtcttttaggattacttgcccagtttgacacgtttcttactctagctgtaactgtgatctctgaaaatgtttactttttcccccagtcttcagaaatataaaaaagatacaacttcattttattaaacaataggaagaaagaggatttagattctagtcaagaataaaaatgtagtatattttgtttttttcag

SEQ ID NO: 221 - DNA, 838 bp, Homo sapiens
tgtaaagtttggggactaggaggagatgatggtagtaaacagtacctgtgctgcttccttccacctcaaatgtccaaccactggaggaagcagtaaatgattaaatatgaggcaccaggaaaagagcagtggctatggagtttccacaggttggaaaattattcaactatgatatatttctatagtaataagccggtatttaagaatgggaattaaaaatatatttggttggattctagagtttctcatatgtccttattaattttaattaatagcaatttgagagaaatatgaaacattttatagtcaatgctgactttttcttatagcctactaagccccagcccccagccaggcctccaccacctgtgcttccagcaaatcgagctccttctgctactgctccatctccagtgggggctgggactgctgcgccagctccatcacaaacgcctggctcagctcctcctccacaggcgcagggaccaccctatcccacctatccaggatatcctgggtaaggctgcaacattgtgtatcccaagttggctaatgttgtttctaggctctggctaacctgttaaaaacagggtcatcccttctccaaatggaggtgtcatgaatgaataagctacactgtcagcttatccagaaatgaaaataatgttatggtcacttacatgaataggatagctatttcctaggcttttaaaatttatgtttttatattttacatattgggtttatattaaataatcttttctgtattatagagtttagtaggtgtttccttggactttaggtgataaacaggtaccttttctgagcgtagcatagc

SEQ ID NO: 222 - DNA, 1224 bp, Homo sapiens
aaaactgataaggccttgtttacgtccctatacttagaatacttggcatttaataaacagttgaatagaaatttatctaattatgggttgcactttcttaaaggttaatctctgtggtaatttcttaattttaaaaatccaaacatttgactaccttttaagatgtgctctaaattttacttagtaagtacatgttgtctgccaaatattagaactttataagttgtaaatttatgtatatcacagtgaatattgaatattgtggaagaggaatgtatttagatgactagttttgccacgttaaaatgaagggtctccattttttttctttctttaatactcgaatatttaatcttattttcttcagtatttatttttggatagtattaaacacttggtactcttttgttttaattaataacaggataggaatgcttttctctgacaagtgccttgaaacagtttttttcactccactgttctttaatagactaaaaaatagaaatgactttcatgaaaaacgtagttctagaatgattattgttttattttttagtatttgatttaccaatcaagatttttctgttttcttctatcaggtattgccaaatgcccatgcccatgggctataatccttatgcgtatggccagtataatatgccatatccaccagtgtatcaccagagtcctggacaggctccatacccgggaccccagcagccttcataccccttccctcagcccccacagcagtcttactatccacagcagtaatatgtctgctcagcagctcagctgattcagatcagagggaaagaaataccaaccctgcaataagtgtactaaactctacgctctggttaatgtaatgtactctcctggactgaatgcagtgtataatttctgtctacagctagaagctgtgccccagttccacatttgattacacatgtgagatttgctgctgttgcagtataaacactaggtataataggatttgaaattgcattacagttcataaaaattgaaaatgagaaattaaacctgcaagtgaaacatttgaaacgattatactttctacataagacatggttgggacatcagatacttacaaagatggtttaagtatggatactagagaaaattaagttttctttctctttggtttattgatttggtttaatttccattatgctattttgcataatcaaggcactgtaaatc

SEQ ID NO: 223 - DNA, 2005 bp, Homo sapiens
cttaagaacagttgtcattgttatgttttgttattgattctcattactgtctaattttttttctggtattagtctcattttgtatgtatataagttaaacagatactgtttttaagtgcatgaatagtacaagttattatcaaggatgttttacagggaaatcaaaagaatattatcatactttatctttcgtatgctgattagtaaacgatttttgacatttattttagaaagtcctataatgtggaagaaacaaacagttgctaccaaagattcttcaaataaacatacaaataaatgtgtatatttaatgttttattgttagcttctccagaaaattgatgcaaattctggtaataattcttgcattttttccccataacctggttaaaataaatacgccattggcaatacttcataatgtaatggaattgtttggggaacacttactgtaccctctcatcctttttccaccttactgtgttaacttagtgacatttaatgcccaatatgtatgaatagatctaagccatttaattttttttccttaaagattggagtattttataattcaaggagcatacaaaacaatggttgggaacatatgccaattatggaataggctatgtatttaatattaatctctgccattaggatatctactcactgtataaacctcagtaaaaatagtgaagacatgcatcatggaatgagaaaatgagaaaggaatgagttgtctaacatcacagtgggatctgttttttgtgaggttcatttctgaacacattaggcatatgagcagatttccagtgaatctatttatgtttattttctgagtttcaacgctgaccttttcttgcattattgtttcattttaatgatagtgttacttgtcccactgttgttttcattgagtttggatttatattttaaatgttcgaatgaaagtatgattgtaaaagggagtgaattggtttaaaaatatatgtatattttaaactttgttgtgtgtaggaaacatgaaggcatgttaattcaatataaatgacctttgatttcatggaatattaaagttggtttaaagtccaatagttaaaccttagcaaaaatagctttttacttcatcagttgctaagatttaatactttggattcatcaaagtgtgacatgggcttgtttgacttctgtaagtggcatttaagttccacattcttattacttgaggtactttatactaacataagacagtgagagttagaggtattacaagttgctagtttataatgtcttactaatgcagaaacaaggaaaaaagcaaaattggcctgaatattctcttggggaaagagggcaccaaagaaaagggtaagtgcatctgagggccaaaagagatgtataagccttttagcccattccccatgctgggcctgctcacagagccacaggaagatcattcagaaactaggaaaggaggcccccacagctgatcctgccacagcacacctgactcactcggctctgttagtgtaaccttttaaatgtagcaacacaaaccctttccctcttgtcagttcactcatcctttggtttctttttaatcacctgtgtctgggcacagacaatcacaataaatgcagccctttattactgttaaggatcatactgttggtttggagttggaagggtactactctgtgattcaggtgtgttgtacccatatttataattaggctttattatcttcctaaatcaaggaaaggaaatcatccccagaccatttatgctgagctttggaatactattttaaactggattgtacttaaataatgaagctctgcatagaggaactagtcagaagtggggaaaacactgtctaatttttatcagtctggtataaagtattgatctaagagaactctccctgtgccccttggtctttattctcaattaagaaaaacagtcacatgtcacgacaaaccaatcaatctttatgagatattcctgt

SEQ ID NO: 224 - DNA, 1544 bp, Homo sapiens
atccataccccagcttgtttgcaatttataaacctccccttcaaaactaaggagttgcagaaaaaaatggatttcacagagccttgtgtccctaaagttctgtcccagtcagcagtctttatagtccaaacagattataaaaaatgttttccatttgaactttacagtttgcaaaagtgcttttatacattttctaatttcagaaacaggataatttgttaagtgggtttcagtttgctaatagggattttttgtgttttgttttttaattttcagcatctcttgaagaatcttgctacagccaaatggcatctcactttttaaagacgtttgcaattattagttgattcacagtacagaacaaggtataaaggaaaaaaccctgctaggtagtgttataattgctagattaaaaatagactagaacaggttcattttaagatttacttggaagagcaaagaaggaaaaattatatttttaaagaaagagaatattcaggctttatttctggtatgaagtttatattttttaaaaaaatcctatattatcacaccagagattttagattcttttctggttagaaacattgctggtagttggattatatttttattgtattcatttatcttagggggaacattgtaaagaaacaaaaaggtccagatgaatgtatgctagaaataaaagttgaaagattcttacttctttggagtatgaattcttatttaaagtgtttattcttcagctttatagtttccattatttctttgacaaatggtgaattggaaaatgtaaaaaaaatacccactttgactaaatgcatgagactacaaaaggaagatagtgtttaaattttttttttttcacacctgcaacctgataatttagcggtcatggatgggccatgtttttcattgcttatgtgatttactctaggagtattcttttcaaataccactttttaggttaatttttggaaatgatcagcaagattactatactcatcagctgatgaggggaagggggatgggttctgctgcatcccgagtgaagatgactgagaagctgtgtgcttggcctgctttagtatttactgctatcacagggcaggattggcttaggaactccctgtgagcagaccgactacagcctgtgaaccagagggcttcatgccaccgagcctcagaccacaggctactgccagtcagtgtccctgcccaatgaccggtcttgcctttgtaagttatcaatttggggcacatccaagctgtctgccttttctcctcattggtgctgtgcaaaggatcctggcttctctcagttctgtggctcccgcgatcctttctgcttaaaagttgcgtaagttatgaacacaggtgatacaggtgaagaggttcaagtctattaccattgtttttaagtgttcctatatttttaactgttttaagctttacacactttgaagcccacatgattcgcactcatcaagtatgtctttattgtgaacatgaagtggcccttttccatcttgcagtatattcta

SEQ ID NO: 225 - DNA, 991 bp, Homo sapiens
ggagggggatggggaagggaaaacttataaacagggtttaggctcataattgctaatgcactattatttttacattgtacatctcgattataattgttaatgtttgcatttttttattactcgatttataaaatatgtaaacatggtctattataacttggttatagctggtcctcttctcttgttcccttcttgggatgcttttgaacattcaggaggtttggtcttgccctctctcttagaccagtcttactctgcctccagcctgtgggcttctctgttgccagcaggtgccagtgattctggatgaggaactccctgaggggccagtgtcttctttttccactgaaccctggaagaagaggggtgcacaagaatggccccttcagccttcatcagcctcccacaatggactgggctgcataatgtgttctttttaaaagtagtatgttttttgaataggcaatacacggtataaatttcaaaaggtagaaaatggtgtatgatagtaagtgtccttcctgcccctgtcccttgacccagttttcttccttaagacagtctccactaccagggcgcacagggttcacattgtatttagacttaacagctcccagaagcaggtgtgttgtgaccctctgtggaaggcacacaatgaattgtgatagttgcatctaaaactggagttttattctttcatagagaccaaagactgtttttagctagagaattatttctaagttcagctacgcttgacattattaagaacagtaacatgtactgaatcgctgccaatttctaatcccactatgctttcatgttctttcaaaattatccaaggtatatatcataattttttataaagatttgcattttaggctgatatttaagtagtttttcagcaagaaacttgtaacattgaatcacagagaatagctatatctagaaagggaacagagcataaccacatttaattccttttgacaacgtc

SEQ ID NO: 226 - DNA, 488 bp, Homo sapiens
tatactcagtttggtttattagcaacttctttgttctgctccctgggttataccgagtatactgcatcctctagcttctctcatcagcaggaaggtgggaatttacaacacggtggtgactccacaaaggccacgtgggcccagcgttggctgcaccattccctttaatgaaagagtatttggttcctaaaggaagattcactttcttatttcttgtttcgtattttagggtctttatgttattccctttccataacagtgtcttttatcactattggggttttcagaaaggaaatacaatgtagatggaagtgaggcgactgcacaagggaaggcacttggaaacagaccacagtgctgtggaagagatatctgttgcctttttttccttgtaagtaatgtgttacaaaacttttaaccattagagttgaaatttttctccagcaaagatctgtctttactcaaattacctggtaatgtatgaactt

SEQ ID NO: 227 - DNA, 338 bp, Homo sapiens
gagcagaaccccagaagtccagatgagctttggatacaaatactcaagcctttagtaagcttggaggatttttcacttctcttccatgtgctctcgactgccttctggaatctctattgttacagatactagatctctccacatgttttctatctgtgtagcacataataaatgtttagtaatgttagctactattattttttacccattattttaatcttccacctttttcttgattggagaagtttcttgaaataatctaattcacaattcctttttctgcagcacttggtctgccacacactgtcaccaatgcattttaaaaagttagtccaagc

SEQ ID NO: 228 - DNA, 254 bp, Homo sapiens
gatattttatgatttggtacaatctttactgatctcacattttcccctgtagatagtagctgcttgatttcactgatatcatggtagccactcttttttatataatcgttgttagttgaaaattagccccctgttcctgcaaggattccccctccccatttcctttagatgttacgtaacctgagctagaaataatgcagcgctgttagaatttagcaaaacaactctaggatgtgtgtttacgcagaatgtat

SEQ ID NO: 229 - DNA, 468 bp, Homo sapiens
taaactgtgcctgggaatttgcattccagaagagaaggatattgaactagaaggataggtttgcaagtgaatactgtattaagatgtgaatttgtgggtggcagtgctcttgtatttgtccctgttttcatctccagccaggtggctaaacccgttgcatattcctgcccctgggattgtttgttgggttggagggtgggtgggagcagaagctggggtctctggcaggagtcaaagggagtggtaacatttcagaggggatgaggttttggtttaggagatcacagcattcccagaggtatcatgcttcaaacgcagtggagcttccacatctgaagggacagcgaggccaggcagcagcccagggagtgcctggcaacccctggggtatttgtgtggggaaccagtaattactgagacggaatttctcagcaccctgaggaatgagcttctgaggcagaaacaaat

SEQ ID NO: 230 - DNA, 306 bp, Homo sapiens
gtgaatatttcttgtgtccctggattggtgggcttcaattcacatccacccaccacatttggtccatctctggaatggcaaagaatatttacatcacacacaactgcaccccatggtctgatgatgacgcccattggagatttgctgagcagaaataaggctctcagaagccgctgttgggaaggggatgaagacgaagctgagtttgaagagcagcctgaatgctctcacccactggtcagatgtgagggtcaccagaatggagaggaggtaaatcacttattccacagtgttgagattcttccg

SEQ ID NO: 231 - DNA, 1605 bp, Homo sapiens
atttcccaggcaaaataccctatgactgagagagaagaacctgaatcctggcattcaagaatattcctacagtggcccagcctggtcatgccatgtaaggcctaggccaatgcattgccccacctgtggggaaggctgttttgtcatggtggaaatgaacccactggaaacaatgggtgttttggggagaatgaagctcccacttggccccagtagaagagcattcgagtcttgctggggcccatttctgagatgcaccagaagttaatcaactttttagtgtcagaagacgcttatttgatccctggggcccatttttgagatgcaccagatcagaggctgagaaactgcagagctcagtgacatcacaagggtgaggccctcgggccccagggctttcagagcacaggaaggttcagtgctgagtctgactactcagagctccagagtaggctttcttgatgctgcaaccatcaccagcacacagtgggctgccgaaaagtgtctgcacctacccagtgaggacagggtgcaggggctcgtcctcagtgctagacttcacaagccagggctgtgtcttcagaaccggtgtggacaaacctgagtggcatatcccattccaagctctatctgacagaccctcaccctcacacctgctcccaaccacagacgctgtaaaggctgggtactaacgggtgacggaaaccagtcaaagagaaaagctgattttggtggctcgcacccaggccttgctgttcaggccagcacatgctgacatgtcaccaaagctaattatcctgaaggaccctcccaaactcctgggaaatgggcttttgattctgggtcccaagagtgagggtctaccctctgccctttgtgggaggcgggggcctaccggtggggggcacggtgaggttagccaggcataccgtccttggggattggtcctgacaaggccactgggacatgtggggagacatgggacatttcacagggtgttcagccatcaagaaatcttgcagttgatgttaatggctgaggagtgcttgggggcaggaatccagggtgggcctaagagtagttggtagtacaccactggtgctccttcctaggggagactgctgccctctctgtgtgtgctttcatgtggagtggggaaggtggtgcttgtgccggctgggcagtggagcatttcagacaaagaggcatgtgttgaggggttcagaggtgagaaggggcagcaggcaggagacctcaattaaatgtaaaaagcctcaagaaattgtaagcacaggagagcagtggtcagatgagggttagatagctcagcagggagaaggagtacatttggacttgatgcggaattccttggcagattagaggcttatagagaggggtctgggtgctccatccagggcgtcctttgtgggccatgggtgctgtgctgtgggagtcactatctgtggctgtggggccttcaactgaccttcagtcttgcctactcgctgcctctcccagaggcacggatacaacagggagcctccctgtggactggcttttctccccaagccgtggggacccatggggtcttctgggaggcagtgg

SEQ ID NO: 232 - DNA, 452 bp, Homo sapiens
agaaagctgaacagactggccctggtaggtgctcagacacttggctgttttaattattcctagtacaggcaaacctgcccccaccaccccacgcttgtggagactttgctgggtttattggccctcctctgcccccagtcctctctacactttattttgctgaaattcacttcaacagggggatgttcagccaagacaggacagaagctggtgctcctgacttttttggatttgcttcagctggatacaatgttttgggttgaccatttaattcagatttcctagttctcacacaccttggaggatttttccccggaaatactacgaaagtggtaacttcgcctcgtgtagagagactgctcaatgaataaattaagctagattagaacagctgggtttcaccaagcccaaggggcccaggaacagaattcaaaggatcagtgaactagagg

SEQ ID NO: 233 - DNA, 1194 bp, Homo sapiens
cggaagaagtccataggcttcttctgacactaaaaaattgataaacttctagacattggagaactggaaggataaagtggcaattcccagtttagccacaagagggaactatttcacaacttatgtttagaaagatcatagctgggatttttcttatttcctcttaactcgttctaaaattggttcgaattttcttctttactgttagcagtgtaattggggtgctgtgatgaggctctgtagcggataccccgccaagagctgaagcatccctgtctcatgaacccaggaagacgtgatatgaaaaagtgagtctcccaggcactagatgagaatgccaagtttagtgccccagcttgtttgctgtcttccccctgccccctgaaaccttgtagagcagagacgatacctccttttttattctcataggaacagttccttcttcaggttagaaacacagctgaaggttttccacgaatacagtggctgttagaagaatgtgttgtttgtgtgtatgtgtgggaagggggcagaggcagggttggcgtgggagggagggaaatgagagctttagaggtggagagaggctgtgatcctataataaaaacccgaggacctggccaggccttccacttggttatgcagtggttgcccctagggctgattttaatgggaacaatttcacacgttcccttgtcgtttggccacatcagcacttaggtcaccgtatatatttaagtgcacagaattgaggtcttagagtgtctaattgcaaagggcggcagccactttcacaagtcagcatcctacggaggagtagctctgcagtccctcacttgccctgaagtaggtcaggctggagtaaatgcagcagatgtccacgtgggcgcagtcgcggccacagaacacagttctgagttcaaacctacttgtgactccaaaattaacatttgttacactgtctgcctctctggcctttagggattgttgcctgttttttttgtcccccaatgttagttatgagcaacattgaacaactcactgttgaaagcagggctttacaggctccatcctaaatgctggggccaggagagaaccagccgtaagtgctgtggatccctagagctcacaggatgcttggcacgtgttgggtaaatacaacccctctgaatacggtcctttcaggtgtgtcta

SEQ ID NO: 234 - DNA, 1654 bp, Homo sapiens
aatgataatgaagggttggtggagtgatgaggaggtagctgttggtagtgtaggttggaaaatgatgatggaatagttggttggtggtggtgatggagccgtaggggcagcagttggtggtggcaggctctggcagtggtgacaagataggaggagcagcgcttctctctgactccttggaggccatccttgctgtgaccaccatggtagtgccaacttcaagaactaggtttgtgcctgattctagctctgcaggactcctggctattctcccagagggccctggtgcttcctccgcctgggtcagtcctgggtgtgctggaattctaagctgcaagatcaatttctgcttgtggtctcagaacttgtttcatttatttatggacatgcccacacttgattttatagtcttgcctcatactccattttttttctttgagaaaccacaggcactttaaagatattgtacaaatatttcttataacaactttttgatgctggggtcaggtaacagaaccttgctttataggtgacaaaattgaggtgattctccaggttacatgtttcttaaaccattgagaagtgacatctcgtttacaacccttcctgtggctggtagaattaatttttgttggaaaaaaaggtcattttgttatatttaaacctcccctcaactatgaaaaaagagagctgtttcttttcttttttcagagagcccactgggcgccttgttcctgtgtatttgtccatgaccctaattctttactgacgtgagcgaggtaccaggagtgggggctgcagagtgaggacacgggagtggacgtaaagttttcatttgaagcttcagtgaatggggtctgtacaacccttgtcatccaagggagccattttggagagaaaaaacaaaacaaaacaaaaaaacttctgttatttttgaccacttaaaaaatatttgcttcacatttggtaaaactgagaaaaatcacattttccttagtgaaagcagctgcagtttcttccatagcacctttgaagatgggatgggaggggagccagggatggtgcactgttggtgcatgggccagggcaagtgcaggttgcctttaagcagatgtgttttaactgaaaaaggaataaaagggtacacttcaggacatacttatccccaaaaggctgcttcctaaaaatgctaattgtgcatgttaaacagaaaccataggctcctgacagcctcacagagtcctgtttgtggatgttttatggaggtgatttaaaccctaggactcttcctttcttccctctcgtgaaggatcttggtgttaccaactcattagctcgtgttcctgttatttgcctgcagttgcagtcctctgctttcaataaacgggcctagcactgtcaggggatgttgaagtcacggaggtggccacactggataatcaacagtgatgacaactttgcaaatttaagaacagcacacgaggcagaaatgagaagccgcatgaagtgctgatgaagagcaactttctaatatcctcctcctgtggttccacatgagatgtgagctgtgaaggaaagagagttatgaaccaattggtgctttgaattgagattctcagagtccacccatgctgctttgtgtggagtcttgggg

SEQ ID NO: 235 - DNA, 293 bp, Homo sapiens
tgaaaactctcaaggctgcttccccatcacccctccacctctgggcactgaaggatgagtaggagtttcccagatcggaaggtcaaaaagggatgggcatatgaggcaagaaggcatatctggagtaggcctggggaggtaccgagtatcccagtaggctgagggacaccagaagtaaggacgtgggtgagaaccagggggtgtaagcccaaggagtcagacagggccctatggtgggggcctctggggcttgctaaggagcttagatggaatcctctggccatattaatctg

SEQ ID NO: 236 - DNA, 166 bp, Homo sapiens
tggaatatcggttaatgaattggacctctttttccttgcaaaccccaccctcatgcacccaatatagtgccatcaaagacaagaagaaaagctacatgaggaagggatatccttctaggagtccagatgtcctgcccttacagtagcttttggaatactatagtca

SEQ ID NO: 237 - DNA, 415 bp, Homo sapiens
tgtccttgtcatctataactttcccagattagttcttctataaccctagtgaaccctgggcctccacatggctcagtctctgcagagttctccatatacaaaaacaaaacaaaattcagcagccagaagtacttgagaaggaattccatttgctgcatgactctgttgaacttcgaggggataagagtcaccagccacagttccacttttcaaggacccttgcctctactcctcagctcctccggatggtctcttgtgccagcacccaagctgctcctgtaaccacaatccagagctgatttttctcttgcttcttccttcctcatctagttctttattaaagagattgacctggcctctctgcgcatatcctccctaccttcttcctgtctctcaggactcatctcccctcttt

SEQ ID NO: 238 - DNA, 837 bp, Homo sapiens
ctcatcttataacttttgcatcacaaaaatctgggagctgacttggcaaaaacagggtttctttccatgttgggttggggaataggagtttattaagcaaagttatttacagatgaataaatattagcctaaatgagtatgattgattctagagcacattgattttgttttcatgttgcaaatttttagcctttaaaaatagaaatttaaatgggcatttaggacatattgcctataggaagctaaacactttttcttaatgcattatattcaagattagggctttgctctgagattcccaattccaggaagaaaagtttctaaatacattctacttggaaaaattatagttgttttctcttgtgcactaaaataaaatcagtacagagaaaaaaaccccaccaagcttttggtactacaatttcaattctcatctttgtcaatgtgcacataggcatttagtgttattataatgaatgcatatcagttgattgtaatctgttcttttccatttaatattattttatagcatgattttataaacatacagttcatatagttatttttagtaactatatattttgagatatcataattggcttagtcatgctcctttgaccagtggtaatttcaaaaatatttaacaactgatattcatattgatcaatcagaacactctaggctatagaaacagagtatgtcctggaggtctctgtaggacctgacattaattcatttgttgctggattgtagggtagattgttggtggttgggaggttgggtagggaatatttactaactgatatggaagaaatgtaactattttcttaattaaaa

SEQ ID NO: 239 - DNA, 399 bp, Homo sapiens
tgctgtcgcataccagggtggctggctgactattggctctgttgcaaattaagcatttataatttgcatttttcgacattatgtatagcagtttcatgaacatcatattcttcttgaagactgccattcctggcattagaaaaatacttactaatggaacaggtttagaagacctttagtcattcaggaaccatttattcagcacccctctgcactaactgaagagacagcataagcagcagatatatttgtttggagtctagaagggaagatacacagcagtgaacagcacaatgtggaatgtggtttctgttttggtcatagtgtgtgtgaaggggtttgggagcaaagggagggactacccagagggacgggtgtgggtaaggaaagtgtagttta

SEQ ID NO: 240 - DNA, 418 bp, Homo sapiens
cttgtgtaaagcaaggcttccagtactaatggcaaagtttagttttgaaaaatgagttagtcaaggaatgtggtgagcagtgaatttcaggaaccacaaggtatttcatcccagataatgaggttagagagcaagccacagtgagatggcagtgaaaagcagggcagggtcccaaattccttcagcctgttcttgttggaggcaatgcagggtcactgacaggtacacatttcattgtgtagggttggtgctgaagacaggggccccatccagtgcaggctgtttgactccttgcagtaagtacttttctaatgccaagaatggtaaagtcatctggttccggggcaagaacctggaaccagagaagggatttcttttcttactgaacacagcttggttatctgtgaagtcacactag

SEQ ID NO: 241 - DNA, 297 bp, Homo sapiens
tgtggtggccttgctatcagttatttagttttccaaacattattttgttgaaaaaaaaaaaccatttcttactgacttaaagtgtaaccctgaccatatgtgatgtgtttatctatttatgcagactcacatgggcctctttgtgggctttacattctgttcctttcatgtatttattctttcatgtgtcctgccctattattttaattactataatatggtaacatatcataatgtctcaaattgctttttaaaatgagatgtttgttgaaaagctttctttgcccatgtaaagga

SEQ ID NO: 242 - DNA, 208 bp, Homo sapiens
taaagactgagatacatatatctatcacatcaacaaagcatctgtcattagcagtgtctgctacaaccaactgcttacggtagctaagtatctgcttttttttctatgtggaacataataattcctgccccaaggggagttccatttaggtcctgcctctgaccaaaggccagttctgcccatgaagtccaaataggcttcctttggt

SEQ ID NO: 243 - DNA, 485 bp, Homo sapiens
gagattacagtgagctctaatggcaaagattcccttttctggctgtagaacacatttcatggtggggctacttggatctcctgtttctgttctctgggaaaaatgccctgttcattatctactggtgtccctgcctctgcccaagggaactttcttccttgtcttttattgctcatggccataaaaatactgcactatcagtcaacttaggttttcagccacagacagaaagtacctctcttagcaaaattattttcccttccatctctgtttctgatgggctggctctagactgaggtcatctgtcttgtagagttgcatgaaagaaaacaaaaaagcagctaatgcccaccaaaactaagattttctcctaatgcttcagcctcctttggcaggttgtcttcaagataccacctgtgagggtttaactcacccatgagctttgtatggagtaagagtcaccagattatcagcctgtggtactg

SEQ ID NO: 244 - DNA, 528 bp, Homo sapiens
tttggtgcatccatgctctgctctgctctgtctgtacagctgtaattcttctaggcatgaaaggggtgcgcctctcactggagctaaggcctgttataatcttgagtttgcacagtgtctaggatgtggggatggcaccttttagtctctgtggcctctccatcctgtggtgtccaggagccctttcttaggacctgtgtggaatctgtcactttcagccttgtgttataggcttctatgtctgtcttctattctctgctggctcaagcctcctgtgaccagtcactccttcctcatacacagagtgagcactctttcactaccaggtactgaagtcacagggtgggaggggcctagtgctgtgctacaggatttcccagtctggaagggagaggctttttatggaaacagatctgtgacatgggaatgagtgtcatggatgattctacaacgtgttggggctcagagacctgggagatgctgctatgaggtgttgatgaacgagttgagtcttgaagcaagattaag

SEQ ID NO: 245 - DNA, 235 bp, Homo sapiens
cttgtgagaagacatgagagaaagacccaatatgttcaggtgtgatgaagtattcagggctgttggagcacagggagtgggatggagtgaaatgaagcttgacagtcaaacaccttggatgtggagtgtgggttctagtttaaagactaggagtgaccagatgtctctttttaagatgggcaggacgtgatcagatttgaggtctgaacttgaatctaatttaacttattttttc

SEQ ID NO: 246 - DNA, 1093 bp, Homo sapiens
atctttctattcatttctattaaaagaagcccttaacaatgagaatttatctatattcatggttgcttttttcctcccaatttttgtgattatcattcatgccacttctacttgcaggggcaaaatttatggagatgacactctctagggttgtacctggcttccatgagacttgagttttgcagatcacttggtgtcctctcctgagtcctgcctcctggggcctgatttccctggagttgtgattaggtgggttggagtcctgcttattggagtcctgcttcctggggcctgatttccctggagttgtgatcaggcaggttctgatgagccacctctgcactcacatgccctgttcttacacttggagggcccattggtgggttccacagcaggggtgactcttcagaacctggatggctctccttctaggtcctttcccagctattggcctacaaccagcctcagagctctcagtttccctactagctgagtgaggtatgtgagggaggaaggctgctaatcatgcacatgtgcatacgcccaaagcatggcccccgctgactctgcacttctatctgaaactgccatattcctctgcctttgtgtgacaatatcaaaggctcatgctagaatgcaaaggtgttatgacgacagtggcagtgactagatcctatagtcatttttatatttacagttgtcttcatgtaataacaactactgctctccaggcgccatctggccttatctgtctctccagactcaacttgagcctatcactgtcttccctgggctctgctctttctcagcacggggactttacacataccgtttcccgtaaaatgctcctaattctgtccttccccattcccctccgtctttgtcaggcattattacttcctgcttctgcatcagatgcattccatctgttgaatcttcaaggagcaagccctctgcaaaaccccagcctcacacccagtctgggcctcttgtcctgtagtgcaggccccaacgccatcactctggatattgtaacagctatcacagagcataattaagcttttgcttccaacatccctcgattcaaatccgg

SEQ ID NO: 247 - DNA, 858 bp, Homo sapiens
caatacatttttaaaacatgaataaataaatgagtgagaagtttcattttgtgttagatttttaaagaaaaatagagaacatctttctgtcctttcccaccaagcctgtccctcccacccacacacaacagtcctgatggagacagttgataggacacttaggtggcttctggtgttcaggcctaccacccagagtctttttggacatgaggaactttgaattaatgaccgaggagagccctgagagcatttgcaggcagcactgggtaaagtgcacaaagcagttggtggtgccaggctgtgaggccattagtacagggaaaagggcttgcgtggagagccctggccaattaccaggagagtaggagacaggaaggtgcatccaggttcacacaagtcccagcctgctggtgtgttatctaacgtgacagactcagtgtgaccctccttccttttggaacagaaagatgtcatttagcatttttttgactcaggctggagcagcaagctgggatgagaaatcttttcttgccaactcattaaggattgggctaggccctcaggaaacctgcaaactcaggccacttagcagaaaagtcccgatggcatgtccttacctgcagagcctcttacttcttcagggcttccattttcccttctgggtaggagtacaaggaaggctgagaaaagtgagagggtggagttgagggaagaagtcaagggcacagggactgccttctgaggtctcagtgtctccccacctttctcagggacccatgtgtccacagagctttgtactctgcagctgtagccttactatgagtcaaaggtgccctgttgccgagtaggttcagtgtt

SEQ ID NO: 248 - DNA, 293 bp, Homo sapiens
tctgggaaactcttggagatcagatgtgtaagcagttacccttaacacaaagagatatgggcaacgttagaaggattagagatcttgtgcccttgatagcagctgtacccaggagagggtggctgggctactatgtgtatcagggaagcttctagggaagaggggtgtaggcaggtttcccatgatgaatggatgcttggtggatggacaagggcattttaaacaggaaagtcacagtggtgccaaatagcatgacatattttgacaaccaccacactgctttgcgactcctg

SEQ ID NO: 249 - DNA, 324 bp, Homo sapiens
ctgtggcagaaggtggaaggtcagagtgagggaagttaagtctagggaggtaggcatttaggccccagcccttgaagggccttgtttgccacatacagaaccatggagtattaagcacggcagccatggagtcgggaaaggctccaactggaaaggcccccattgcttttggggaggctgctttgaaaggtcaaccccagtgtctcctcattattccagttggggtccagtttccttgaattccatctttttctccaactagagtgtcaagatctgatgggggcagaggctgttctatttactcctccttggtctcttcagtgg

SEQ ID NO: 250 - DNA, 341 bp, Homo sapiens
taagaactaactaccaaacaaaagtaaaattgcagtagaggtaagttctacaaaagagggggtgcatggcattgtacgcctctctaatgcggcaatttgatacagttaggaggccagggaaggctttgctgagtgctgagatatggagagtaaatgttactaggcaaaggctgagggtaagggaagggtgtggtgagacagctgtaaccataccctggtgggaggcagaatgtgggatataaaggactgaaaggagaggctggagggcagagagtaaggagttgcctgtacagcatggggctggggagggtggcaggactcgatcacacagagccctctcc

SEQ ID NO: 251 - DNA, 891 bp, Homo sapiens
gagacaagttgctagctttcctcattaggtccagcaggagattgtctgcctaatggaacaggcaatgaagcctgcagatactttcttaaattgagtttttgactgaggactatggaagctgtagagtctttgcagggattaggaattccaagacttttggaggctttgcccatggttgctggagctactcatactcagagctgaatgctgcccagtggctgacgacttcccctgaagattcacctgcatctttgcatccttttctagggacagctgcaggtgggcaatgggtggacccatgtgtgcgaggaatgctctattgtggagatctgaattatcacttatccagcatcttcctgggtgatcttgagccatttgtccaatcctcacactttactgtagccccctgtgaagtggggtcacttctgttgcttcttgcttccccgtgctccagtgctgtgtggtggaagaattgggtcatatgtcgttaccccaagtgaaatgatcattataattttttgtcctagacatttttccattatatatttgaaccgtttaaaacagcacagcatcctaagatggtgattgggatgatgatggctgaacttggcaatgagaatatgaaacttgggatttggtgaggatttaaaactcagttcaagcagtttcagtctgtgctccagggatccctaagggtatctgagatgccttgggggaaccaagatggggataagagaggacaggcaggtgggattcaggcccattgggcctgtgggagcatcttccttgtatattggagcatcttttttatatactgagattccctacaatataatgtgaagaaagaaagaaattttgaaaatgactgatttaatccaactctcttatccc

SEQ ID NO: 252 - DNA, 664 bp, Homo sapiens
agtatacagttttttaaaacagtttgattaaatacttacaaagtcatgcatattatcatttatgtatgtatataaaataccatgcttatacatgggtcatgcattatttcttctaattatgtccccttctccccacttttccaccaacctcaaatgttgaatttgtttgccctgaaaggtgtttggggaagggtgctttggatttttacaatttggaaactctttttcacttttctggcataagaagtacaaagtaaattgaataggcctatgaagatgttgagtgtttttcatatgcagagaattgaaccccaaaagaaaatggtctaatggggttaataaaggtcagcattcctcagggaactgggaaattaatctaatggctcaaacctctgaggggttaatggaaactgtaaagcaacagctctgcctattgcaacgactataaatagctcaaagtcctgaaccacctcccgaagctgtgatatcctccatattaacttcagcagctttatgccgggctaggctacaacctgaatttattccagctgcatccagaagacccttgcaatatttttcagccatgaccaaaagagtgggagatggatggaaggctgactggttgtgaattatgtgccaagtcccctcagagtgaatggtaagg

SEQ ID NO: 253 - DNA, 1265 bp, Homo sapiens
agatcatcacatagagaatgatgagagaggtctgggagcaggtaggaagagtccatcacctaaggaaactggatcctgtgtataagagggtgggcattcctggaccaaaagttgggctggagatggggctgctggggagacttggctgctgggagactctgataggcaggtttagagcccacaggaaagagggaagttgagaaaggaaaaatgctgcagaagatcagaaagcaagcaaaaattaagggataggaaagaaaccagtgatttttatcaacaagacatggaagggaaagaatgatgtaagccaaacaaatgtagagaaacagaacatatagttctccctgtgaaacacttttaagctgcaaagtgtaaagagatgttatttttgtatttgtgacattttaggcttccgctacttgcaatttaaaatgaaaaaaagaaaatcccaaatcaacctaacttatttcttaccaagttaaggaaaatgacagaggaagggcacaatgcttagctgctaattgccattctttgacaacccacgaagactatcctcagcttatttaaaataagcatgttctcaactctttacttttcatcactgacatcactgttgaggaaaacgtggtgagaaaagatgaagaaaacacattagaaatcaggaatcagagcaagtttaagaaaattatcatcatcatgaagagaaggccctgggactgaaagggcagctcagggcacccttcagaggcaggggtggggtcacctggggggttccctgggctttgcagctcctctattccaagtcccttttccccagaggagtggtggggctctctgcagggctaaaccctgcaatctggctcttctctttgaggttctgattgattttggatttaattttgtcttgcaggcttttctgatatatctccaagcaggaaacaatattatttttcttttcttctctgtcaaaagggggcaggaccttataataatttttctttgtgaaagaggatgaattgagatatttgcagggtaggaacgaataaaaaaagatcataaataaaaggatctcagtagggcctaaggagtgaaccccaaactataatgggtagctactacaatcaaattaacagctcctcttcccaaccaaagatttcagctgcctcaccactgccccgtccccaactaaacactattcctaaaccttcaagtgaatcagttcaaacccaaactggaaactatatgctatctaatgctattggatt

SEQ ID NO: 254 - DNA, 440 bp, Homo sapiens
agggcagtaacttagacatctaattcttcttgggagaggaccctccttggctccacaaagctgcacggtgtggccacagtttttgtcttgctgtatcgaccccctaagtagaaggcaggtagatcaagatggaatctacacttccgcagggtgacctctgcacatagattttctgttgttagactttaaaggagcatcctcctcccctcttggctctgtgttgtcatgtacaggatataatagactcttgcaaggggcgaatgaaactgctctctttggaagctgagttgagtaagattgatttttagatggcagctccttctcagacaggcttaaaataaaaacggtcgagatgagtttgtgagtaggaattggaaaccagacttcagagtaccttgcaaagactgaactcctttgtgttagatgctcacttgattcat

SEQ ID NO: 255 - DNA, 1300 bp, Homo sapiens
ctcaagaatttcctttaggcagcaaggacccactttccaggggcgggtaggttgagggctggaagagtgaggaggctgtcatgttctgctgaatgatctttattgctgagaacaatttcttgctttcacccccatttcatattccagctcttattttttttaaaggagaatatgaatttgagagtatttcctcttttctccctcattcttcctctttgaatgtgatgatatcactatcataatcttcatggttgacatttttcagtgactcaccaccttactattttggtggttgtacatttcaacagataattgtctttccctctctcctgagcatgacacctactcacatctagagacttccaacacaacaaagcctcaccaagtagcaactcactgaacctggtagtgaaagtgagaggtacttatgaatgaaagacagtaagtgaagttgtggatgagaagacaggcctgctccaccaggcatgaactgttagtcctaaaagtcaccccgaggctcagcattccttagactaggacaaaagggaaatctcttgggaaatgaagaccactatccttgaaactaagcatggcataggtgctctaagtggattgaagccctcagggtgcttcatcgagacacccctgagggagagggggagcttctgagaaggaaattccgagagcatagtgttctggggtttggtcatgtttttaatgggtcagaggagttcctctgtctctgggaaatgtctccatttatgttgtgggtctccccacaggcaacattcaaattggcttggtcaactgagactctggctagaactgacttccccgctgacctgtcctgctttaagccatcgtaagtgacttctactgcccctgactcccttggtaataatattctctggggtttacatggtaacgttaaacatacctgctcatggtatttatttaatgatgattttaaattcttattgagcttgtaacacactgaaattttgtgtattacttctctgttttggcaccttgactgatgtactagctttatcatatctgtaaaactgccccatgtacatattaagaggtttttgtcattttgtgaggataagggactcttcaatgagtagggaatcactaatttataaaaccagaagctcagcctcctaaaccataaagactttgtcttagagagaccataaaatactgataggtcacaaaaggttaagtccttttttattatttaactttcctgacatttatgacttgtcttccaggtaaaacggtgtgcattttgtaa

SEQ ID NO: 256 - DNA, 449 bp, Homo sapiens
cgtagagttcatgtacatcagttgtcaaagggcagatgtctggcacattggaaatattaccgaatgttagttatccgtgaatcgggggactgattttataaccacccaaatcatatttatttcctagaggaatgaagatgaaaatagtggtggttagtgtctagcatcgcactatgtttgccaagattaatttgcaatgagccgttttcaaacaggatgttcagccactatatgtacttcttgaagtaaccagcaggtggtgaagttggattatattttagatggtcagggcctggtgtacctcttgcctggggttttgtgagagaaaaaaaatagctttcttttttatcagcaccccaaaccattaacatctggaatcaatagaggctgtatctgtcacttaatgctatagaaattgcaagaaaaaagtcctgctggttagtatacca

SEQ ID NO: 257 - DNA, 519 bp, Homo sapiens
cactgcgattctacttcgcaatgacatgtagtggcaaattggggacccaagaagcaactgatggcacagtcttaataaggtaatttaacgggcatttcctgaaaataggctatttataggaatgtgaatgtgtagtaacgcaaggaagagtgaagtaaccacagaaaacagcctgagttgccttccctgtgagaaggatcccttcaactctagacctaagggagcaagaaaggagaatttaggagagagtcaagttggggagtccttgacaggagcaatgaccttatctcaaagtcctcatccagcctgaggtcaagccaggggggatgtcaggggactccttcccctctccccatcattgtcttctctccctgagaccttgaactggcaccccccattggctgagaccatccgggtatacaggaaccctaaaatctttacaggtaggctttaccagtctacatagggtattaaagagcagaatatgagtttggggagcaaaaggaagacatcctgttc

SEQ ID NO: 258 - DNA, 621 bp, Homo sapiens
aatgggaaaatctgtggagttattgctaggaatggtaatggtgaaatcattaaaacacagaccccaattcagagtcaaattcagctgtgttgatgcccttggatctgattaaaagagcttccttcttatttgagtaggggaagtggattctggaagacaatagaatatggacatggaaaggcatccctgagtgcctgaggagggggcttctgggggaagagcctggcagtgatgcctggagagtcagggtcacacccctggcccaggcagagggcactgctcaaaacaccttgtacctccccaggcaaggtccttgtaacccatgacctcagagcattgagtactttagctcagcttcatctgtgatagagaggagacagctcagcctgtctcctgtgaggggaagatttctgtgtgtctgaaggaaaagttctctgcactcgcccaatgcacagcacttcacagctgccctcaccccagcatcgcaatcctctcaactcctgccctgtatcagcctctcccctccccaaacagacaggcagccaggagtaaggccatggtggttgactcaagcatctctcttcccaggctgaagttccacaggtcttgctctaccagcta

SEQ ID NO: 259 - DNA, 403 bp, Homo sapiens
actaacacaaaactcaagttggaacacaatggttgcacattaaatcattatgtaatgcaaagagctggcctagaagatggtaataaaatggcttacatagtccctgtcgtgctggaaaagtggtatttataagcaagagctaagcttgcctttaaatttgtcaagctttggaattgagttactgtttctggacatgtgtcacacctatacattgagatgatattctctttgcctggcaaaataacgaataagcaattgtaaagtcttttgatttttgtagggaactatcataagccttcctgatcctccctaatcagcaggctaagtcagtttgctgccatacatagaaggagcaggttttggaagagacagttgccagctctgccggtttttatgttagtgt

SEQ ID NO: 260 - DNA, 465 bp, Homo sapiens
aagatgcattagaaacattttatttccatcatccccaaagctcctcttgacctgaaattctatgattctaatatctacgtcatgtagaatggctggttctttagaggacagtaacaacatttttctagttttgacttaggattttggataaggcaaattctacttcctgttacctctggagacatacgcagtcattcagttatctctcttgcctttgaactgggtatacatattcagttggattatttatctctggatttgaaaggattgcatttaattttgaatcaaggggaaagtgatcgtggtgttctgagtcactagtgaagccagttacaagccagcctcaaagcaagcacagtcttgcactgattaggaaacgttgagagaagatggcagccagaaatatttgaagctttaacaccaaacagttgtgacagcaaaggtctccaatttttgcttttcatc

SEQ ID NO: 261 - DNA, 1255 bp, Homo sapiens
agagctctaagtactggcaaggtaatatcataaaagtaaaatattgaattaaaaggaaattacaggaaaatatatgcagaataaaatctgcaaacagtatcataaaactgatcatgaacatattcatatattgcaaaaatatcatacaagcttgaaatagtgaataccaaattcttgaattcagaatggctgttgtttctggataaggaggaacaaagatgggtttgctgaaaagaaggcagtgcaattcaactgcatctgggatgtgatttttatgaacgtgttggggcatgaatgaccaatgccaagatttgacaaagctggatggtggctgcttttttgtatgcttgaaatgtttcataattgtaaaaaaatcccattttattacttgttttgccttctctcctctttttgtcttcatctgtttcatagtttcaacagacttagcaccttatgtctaggtgtacgttttgaggggacagcaattttttgtgctacaaactttctgtaagaggtcttggacttagggattccagttctcagtgttagaccttgttttctgctgggttcagatgagaggtcatacagtgcaagctggggcccaagttgagttaattatttaataaggcttccacttagtctgtgtaaactccacgagctctcctgatggccaactcattcacactccttggcccacagagggttcagaagggccaggaggtgagacagttggtgagaacaaacggcatccttccctgctgtttatcagtgtttctgctgcttgctcaagtaatcaacagcataggtagggcttaaagaggaaatccggtgcctgcagaattatgactgacctattgaggaaaggttcagagaggctggggagtttgtgaccttccggttaaagtgtgacttcaaccaaggcagaccaggagggtgggtgaggcatccagttcatagatgagatcagtgtcaacgggtacaaatccagcagggtgactccatgcgtgtgtgtgtatatgtgaataacacaaagcatgtcatgaaatagatgcattaaatctgaagtatgtaatgttgtatataatgtcttaaaagttcccaattcagcacaccatgaaatgtctaaccatgacaattaaacaatgaaatggctcgacaggaagggcttttgcattccttacagaacttacattccaaaaaagccaggtggagacataaaacaatccttcctcatagatggtttgtgttgtgttgg

SEQ ID NO: 262 - DNA, 678 bp, Homo sapiens
gctcaataaaaattatcattactgttattattttattaatttcatttgtaaagcaagtcttctatgtaaccttccagtgaaatcaggaaagaccctactgtcataatttaaaacaagttttgtaaaacttaattttcattcctttatcattggtaacattcacatggttcaaaagttactaaggctatcttccccagggccttccatggaggccttcactgtgttatgcctttttaaagtgtgtagattaggaatatgcaaacaaacaagcacatacatgtaccaggtagttacttactaagtagactatgtgagcactttgctttttttggtcacttaatgtttctgggagatatttcctttttgttacataagaggtgaagtcattcttttgtatgactgtgttgtttgacaaatggattcttttgattttttgacttttctttcagtcttcttttgcagtggaatacctaggagttgtgttgtatttcttcattttactcatttatttttcttgtctgtgcctcttgcactagctgagccttgattccatcatgatcgagggattccaccaaattcactatttgagaagccctgtggtgtgatgcatatcagggtatatgccccaggaaggtgagtttcataatcaacgttgctgattacaatcaatgtttcata

SEQ ID NO: 263 - DNA, 675 bp, Homo sapiens
gtatgtacaggatggattggaagttaagtccagcaaaaagtcccagtgctggttctgccccaaagacgggtttggggaatattgttctagacagaggtacaagaggacagctgctttggaggaactggaagaggtttagtgtgatatgggggcctagggtatgagaatgcaagtagtaggctgtaacctggaacagaaagtaaggcgggcaggttgccacctgattgagaaatttagaccttgtgcaagtggctatggaaatccactgagggaacttaattgatgtttttaggcacgaggcccttgtgtttagaaattcattataaccctcctgtgtagttgggtttccctgttacctgcagtctattttcaaagccaggtaagagttgaggaagtagcaagattatgaattcccctaagggtttactgtttatccagtggtttgcttgattcctccatgggcttctcccatgacggcccctcctctctgaggtggtgcttgtgagggtttgtacctcctctggctacaaaccctcattcacacccacctgtctattcctgttggtagataagccctggctctagcttgggactcaggcctcatgcatctccttttaaaacaaatgctcttagtgttttccacataccataatgctttgaaaaaaaaattcaata

SEQ ID NO: 264 - DNA, 482 bp, Homo sapiens
gctgacttcaggagcggctcccacagtcatacaaaacctaatctcataaaataccccttcaaactcactcatcctggtcctgcttccctgaccaaatcctgaggatgagactggatttaagtatttctcaaccttggagcttcttgggctttgctattgcaaatgttaagtaagaatattaattttaaaggcatgtttatcaaaataactgatcaactcagctattttaataccagcgattctcacctaaacatacggaattgttttcaaatgggtgaatatgtttctcttcaagttttatagatgtttggtaagaaagcaagtttttcttttttaaattgtttgcctaagagggatataaggaaatgtctgtgttcgattttgcaatatgtgtgcgaaatgactttgcagtgagtcgtggaggtgatgaagttcagctggcaatcattggcagaccccgccgcccccccgccacccccact

SEQ ID NO: 265 - DNA, 450 bp, Homo sapiens
gaaagcaaagaaggaatagggtgatctctttgtgttgcaagtgatggtggggggaatggtgggtgggtggcgggggggactctgactgatcttcccgatcccctcagtttcgttactctgttgacagtgggaattctgaggggcttctcaagggaaaaacataaaacctgacctttgtgtaattctaaagcaagaccttaatgaaaacttgcttttaataatgaagaatgacagtatcaaaagtcaggaagcttctccatagacgttgcaactaaaatatatatcagtgaagatgcttgttgctaataggcgggaacacaaaacaaaatctaatgtacagaatgaatttcctctttggactcctggcgagtgaaaggtaagtagatgctagaggcattgagctctgtcgattgcttaggccgcatatttcaggactgacatgtattagct

SEQ ID NO: 266 - DNA, 618 bp, Homo sapiens
gctctgaacagaaggcgagtgtctagacagtgtcttcctgtcttataggtgccctggtggcatctgtagacatatctgtagtccaacagggctaagttcttacagatcaggttagaatattaatttagtgatatagctcatataagaaaataagaattttttaatcagttgggtcctggacatcgtgactggcaatgtcagtctggaaaccgaagatgtcaccaggaagaaaggacaaagatgtgtgagggatggagcagggaatagactgattttttttttttatggaaaagaataaaagaggatgaaatagaagaacaaaagattcagacatgcaaatcatagtattctagagaaatttctaggcccagaaatcatgaggaaaataatgttagtttctttttccaccctttccaatgagatttttcatgagggtaggaaagtacttctcttatagaattttacagctgaatagaactaaagagacctttagttttcaagttaaaacatttttttttaaagtaaataaaataagaactgcagtgaagaaatgactggtccatagccatggcacatatgaaaattccaaatgtgtatgaggtaaagctagggctttgc

SEQ ID NO: 267 - DNA, 965 bp, Homo sapiens
gcattaaagaatcttccagcatcccacacattttctgacaaggtagttctcacctcacttcctgtcaatgtttacctaagtaaggaatgcttagtgtgatcattttcttaactctttatcctgaagaaggaccttcagtaaagacaatattttaatattttacttcggtttcctatattttactttggttgcctccattattcaccaatttgtgcttgttcagccagaaattcaggaaccacaggaaagctgttgactaaagaaaaccttaaactttcatcccagttctgttcactgttttttattaaagagttttctttttatagtaaactaaagagaggatgttcagagtccaggttcatgagctgcagggctttttttttttttttttttttttttgctcagcagaaccccaaaaatagaattgcaaaaatacaatttggtaaatctttaatgcccaaatactactccttcccctaactaagtcagccactggaaccatttctgcctctgcacatgacactgaccaggaggctaagcccattatttatgcacggctgattttatttctcaattcattttgagcatctttaatgcaaaacaacaagaaaaacagcagcaaaacacccagcctgattataagccttttctcctgacttttaatgcaaacttgaagaatgagccagagatgactcataaactcatgaacttcagtttctggtgaagaccatcatttaagacaaagtcagttccccagactgtgggtttccctatttagtgaacaaacatgtttactttaaaatgctaatcaaaaaagtccttgaacagacattgtcttccccaaaattactaaaatagttaccatgtttcaaattatttagaataggaaactaaattataataaaataattgaggatagaaatctaactgatttttcacctattaaaatttgggtcacaaattat

SEQ ID NO: 268 - DNA, 1355 bp, Homo sapiens
cctgtgtacaaattcaagactttgagctcagttagtctggagagctagcagattcttaacctttgaatccccagctaaaaaccctgtcctgacgaacgttcatgcacattttgacggcctttcagagatgctcaggccttctctgcctcccttactccccaggctaaggtcctctactctagaaaacacctaaaggaacctggggatgtgagttacatatgaaaaccactttagtcctcctaaggacaccatacatattttctgagccatggcaaaatcaataggtaaacaggtattgttagagggaactaggcctggttcctttttcaatggggtttgaaagttgtattttgtttattaggaaggaaagaagtggacctttccagtgggtgattcatcatctggttccttcaggggaagagagggagtgactagagaggattgatgtccagcctggggcctgctttgctcaacagggacctcatgaaggcaggcttcttcctcctgacatttccagcactcctcacgggcactctggagagggatctctgaatcatcgctgtgtctagacacatcaaagggcaagctgcctgtttctcaggctcaccaaacccagtcaggagcactaacgtggcaggtctccctctgaatcactcagaccagagggagggcgctgagaggtgagcaggttcacccggctgtattcgctcttgggcgagggcaacattcctccctggggaatgcaaagtcatgttgcctcttgccaaagccagtcaggtaaggagacactgttgattttgtctctgcttcctggtgccagagcagaccaagcagggctttgaagatgttgattagacgtaagccttgacgaggaatgtgactgtcattcaacagtgtaggcactcagtaaatacccggggcatgaattcaagggaacgctaccttgcaaaatgggccactcacttcagacaagtaattgaaagaaacatttaaaaattccaagagcaggaaagataaaataattgctttgggttgctcttcggaagcctaatgcaacatacagttaagttttagacttcctgactattcttcacaaatttcttttcttcaaactcatgttgttcttatatctgaatgttctactgcatactctaatagatttgatttcaaccacatcccacacaaaatcatatttacacacacacacacacatacatatacacatatgtatatgtatgcagttgattatggacatagttttctgctttgcagatactttattaaacatctattatatgtgatattgatatttccttttcacatgttagaaatattttgttttccggtctcaacca

SEQ ID NO: 269 - DNA, 485 bp, Homo sapiens
aggtcttaaccatttttgtaggccctgtgaaattctgatcctgaattaaatagccctaagattgtagaaatgaataacctttaatggagtgtatgctttttatggcctcatcaataaatgaatttattcctgacgttcttctaaggctaatcactccaaaggatttcagagtttatctacttgaggttatttacttgatacattgaggtggttccatcctgtaactggttaagtggatagtgtactgtttggggctgttgaagggaggaatgtagctttcattttctaagcaccgcaagagaaatggagaggaggtcctgtgtgtgccctgagatcccgaaaggggaattatgaactgcgaggagcatgtgcttcaaatcgtttgcaaatttgggccaatgagatgctctttaaaatgtcatcctcaaaagagggcatcccattcatgggtctctgtatgagcagccctaaaaagcaaagagcca

SEQ ID NO: 270 - DNA, 997 bp, Homo sapiens
cacattttattttttaaaatgtgaaaccgtatcttggtcatgtctttagcagcatggaattttggaaagatgatgacatttgaggaaaggaggtgaaggaagagacttgagtttaaactggcaccttctaatttctctgcccccaaaaaggtattgatatatgtgttttaattgttgccaatatgtgtctgaaggttgaagaacactcagagaaaaaaatgaaaaaaacacatgtgtttaaagtggtccataactaaaaaaaaaaaaaaaaaaaaaaaggtggtccataactgaaagcagcctggaaatggtcatggaggtcatggaggtagtgctctggggtgcatttcactaagggctacatcatcccttgaggtttgcaaagctggtagctaaggaggatgaggtaatgcagggatgttcatctggcacatttcatctcaagagctgatcatctttaggtcgggaatgaattcctcaccccatatagaatattacagagttggctcaggtggacagagaggagagggcaaagaaattttgatgttctcaaggccaggaatgttgcccttatatgggtttccttggaggagtcggctgtgtgtgcagcttgttccttacttgaggtgtatcaagacgttcaccacaatattcagtaattaattatcccaatccacatttaggaaacagcagaggacactgtgacattatctaacaatctctcaggtcactgcagatgaaactagctttgggacataggcctcaaagattcctgtgtgtagcagtagctcattagcccttttcaagagaaatattattactgtcaaatcagaagcttttgaagccttttggtgctattctgtctaacacataaaagtcttctacccagggaggcatagtatttggtttgtacagaactgtttctcaaagtagttacttcatttgccttcaaatttctcctctattttcaccaccacttaactgttggccaattgga

SEQ ID NO: 271 - DNA, 899 bp, Homo sapiens
aaattgtcttccttaaaattaccagcatggaaaaataaactattcccaaatgcgtgatgctgtgaatctgagagttcaaatgcagcattagtggaggttgtggttgatgggcaagtagctcatatgtcttgggataaaatgctcctaagaaggaattttggccccattcacaggaggacacttttttcctcattttggctttttttttttttttcccccggcctggacacaaagtccctagtaattttatcacaactcattttgggaatggtgattcctgggccataattgatttcaggagttggtaactgggctgcaaatcaaacacgtgggagaaaatatcttaccagtattgtcgaagccctttggtttatgtgctttggtaataaaatcctcagcaggggagttcaacaccatcttttggtttctgtttctaggtttcttctttcttgcttgaggaatgggttagtatgtgggtttgtgcaggagattcagagagagggcctaagattccgcttaggcttcatggggttcacatctttcgatttggggcctatttgatggctttgctttattttaaagtgttttttgtttcataaaacttatttctttcttcttagaggtcatttgtagagattgcattaaggcttacagttttgttgtctggtagaatgctttgtcttctttttaaaaaaggaactggcctgctagcttggcattagtgtgtaatgatgacatcatttatttgtctctataggaaataggcattcattcctttttttttttttttcccagaggggaatgagttcatgttgagagtatatgataggatgtattctccctggttatcataagcggacgcattttttcatttacttggaagatctttctgaaacata

SEQ ID NO: 272 - DNA, 1467 bp, Homo sapiens
cagtatctctctgattcttgaagcctttctcagcctaataagggccctaaacttccactggaatcatggagagctcttttctgtccttttttattttttagtgaataagagtcagattcaggtaggacaggtttaattttgaaacttgaaaaattgctcaggacttcctcttcaggatatgagcattggtcttaaatatcaaaagaaaacaagatttttggtagggttcttttagataaatgcttactacttacaacatataggaagaggaaaaaaaaaacaaaaaagtgataaacattataaatagtgtatttcttcacttcctttaaccatcatttgcatatttgtgcccagtgtccaatactaagtgttgctttcaccactcaagtgactcttgggacctgtcctgagagctgtggtttcaggctggatgcaatgaagtctttccaattgttatacaattgactgtgagctacttaaatctgccacttattaagaatgactggttatgaatcatcccagttcccaaatatgatgatgaatttgtgattactctgcaacagttttcaaaacaagatctcatacctttcatcaggaagagggaaaatggtttcattttcaacacaggaatttgtttccctggttgagacataaaacatgtgtcttaatggttctgcaatgtgctgggatttactctgaaaggatagtgattcacgaagagatggagtcgggtttcacatcctttgaagtctagggttgcccaattgcagtcatggagcaacatgcagctgagaataagagccaactgttcctgagtttgtctttaacggttaaacatgcctcatgtggtgtgtcaaaagcttataaattcataattggggcaaggctgctgtgggtttagttgccaataatgtgttgatgttgggttcagagtgcccaattaggatggaacataaagcaatgcatggcaacgaatgaatatgagatcactcatgtttcagtggaattttctttgaagatccacaaaactggagaaatggctgcccggataacgctgacatcaccatgtggccatattcagagggctgaagaagtcctgacaaactaaagtggggtgcttctgaagttccctaaataggattggataaagtgtagggatagagagatggtcacatgcaggattccttcccacctccttcctgtcatatcagaatacttgttactgtggctgaagtgacatttccatccagaagccaggatctggtttagctgtgcttgtcttccttcccggagctgagtcatgaatggcagtttgggatcctccaaagtgaaaggtgtcttttgttcagccactcgaggctgctctctcactgtgctcagttacagtttaactggcatttccttgtcagtactctgtgctgttgtgtaaagcagattcaagctattctatttgcttcttcttatttg

SEQ ID NO: 273 - DNA, 599 bp, Homo sapiens
agtttaatatcagaaaaacagattgattcaaagactttcaaaaggagaaaattcaatgtaatccttaaaattgttatgaaaattgttataaaaatcaaagcagaaccacccataatttggtggttaattttcaaaataaaaagcagctgaaattttagggctaattgcaaaaatgaataactagattaatccatccctgcattgttttaacctgagtttctaagacactgacttttcaaataagctaatataaaagaggggctccaaaaatttacccatacctatgacagaaagtagcttgcctttctgtgtattatttatgctacatggattaaaaattttataataaacttcttagtaaagaaagaaaatatctcatttttcctctacacttttgacttcttcttcttttttttttttttaaaaaaaattcccatctgctttaatgtttttctttggttaatattttgggatttgttcaacaaacttacttcttaataatgcttgattaagccttgtttgcaaaatcaaatatctacagatgtgggcaagaaacacaatcaagtaggctcagggtaaaaaaaaatgtctacagttta

SEQ ID NO: 274 - DNA, 680 bp, Homo sapiens
aatactatgaaagtcaaaacaaatatgggtgcagtacaaatttagctggtagttttttgacctctgacttaggtgactattataataatctggtagctgctagtccttatattcctagtagctaactgtgggaggaagtgcatggtatcgaagttacaaaacaaatattagagtagggaaaatcaaacttctatgaaaaataagtcagcaagtgaatacgtaaaattgagtgggtatgtatgtgtatgtgtgtgtgcatcttcaaaataatagtcaattattatgcagtgatgtactgtggctctctggaaacataagaaccacatacaaaatataatgggatgaatcacaaagtcggttgcaggtagacatatgcttgggtacaattatttttagggtattttctgcaaataatggaagttaaaaggagaaatctaatcaaaaccagaatcagcttccagacagccaacccatctcagatgtgagaactttttgttagctggttataccatgccttccactccgtggtgagatgatgaagatgcccctgggtgaactgcaccctggttttcttccgtttcgtatacttcgttcttgctttgtgcatacctgaaatccatgcagactggaacgcactgtgcacagttgtgtggtgactgacgcctgaccgcttcatcatg

SEQ ID NO: 275 - DNA, 501 bp, Homo sapiens
atcaatgactccctttgctattactccttttattagtaatacagagcacagctactccttgaagtgtttcataaagtttggtgacactcttaacactcctgagaggtcaagcatacaattggcttaggttggaggaacagtgaacttggtggtcttgttgagccctggtcatgcataactaggatgccagatgcttcgacctgtaataaaaaattccccttgagcttggtagaatttggcaggctcaccgttcatccttacatgagccgtgtgagtcaagcactgggccagctcggcagaggcatcgaagttcaatcacagcgcaaaatctaatcaattctcacagtcaatgaatgaactgatgattcaggtatttatagcaaaaggtgtgaagagattatttggaacatggtggagggtaagaaacaggtataaatctattccagaatttcatttcttgtgagtcttctaggaaatgagatgaatgaacttttaaagaac

SEQ ID NO: 276 - DNA, 832 bp, Homo sapiens
tgtcaacatctatgctgagtgtgtagcccttattactcagcttggcactttacctttctctaagttgtcagaaactactagaaatttgaacggtttccatcaatgtattcaaatgaattgctttagtggtgggcagaggaaagatcctgttttttcctcccctaacacgcacatcccattaatcaacagattccttgttatttaataataaataaaaatacattaacttgttgaggcaaacatgtttcccaaagccattattaaaactgaattaccaacaacatggtttgaacagtaatatcatgaccacaagtcatttttctcagttgactttctgactggtgatacaaaatccatgggaactgtctgaattgcgaggcaaatattttagtaatgagtcgatccccaaaacaatttcaacactggaatggaaatttatacattccttaagctttgcttcaaagacaggtaaaattccttctgaattgggtaaatggaatgcattctataaactgtacccttttgttacaatgaacccaattgctcccgtcgttcataatctggcccagcaagccaattctttgttccattgctaatccatagtgcagattttaatctccaacaattagtaacccattcctacatatcttggaaagttcatgactgtcagggtaggcaatttttacgttgtgtatataggtctccaaagagacaatacatgtttgtggaatgaatacatgcttttaaaattcccatttcaataagtggagtttgcaggatactttaacatagcccagctgagaaaaattttagtgaaagaggaatctagaat

SEQ ID NO: 277 - DNA, 649 bp, Homo sapiens
tacatactggtatacttttataggtgagtttttcaactaattttacagtactgataatctaaaaacttttgaaaataggaaaagaaggcaaattacccagttcagtttagaagatcattgtaacaattccaagatctcttgatgaaagtcattcagaaatttggagataaaatgttatttcattggacctgccaaaatatgaataactgccataatcatttattacctaagaagtttgatattgacccttacagttgagaattgttgtgtcttcaaacgaagttgttttctaattttttgttttttctgtttccagcaaaaagtatgctagaatagcttatcctaaattcattctaggttagttgataagttaactattttaagctcttccggcatttctacactcttaaagtcttaatatgaatttttttccaggtcactcgctagtgaaccttggaaagatttggcaaattgacttaatgtttgtccaaagtcagactcagcttatttttccggaagctctaagttaaaaaaaaaaaaaagatggaattagtgttggaaatcttattaagaatacagtggaagcatacttgttttgttcttttgttctgtttctatatttctgatccagctacgttgtttctctata

SEQ ID NO: 278 - DNA, 661 bp, Homo sapiens
atccagaggaccgctaccggtctccagtagatttcacctggtgtagagagatctgggccaatcataacagaaaaaaagcattaacaatacataaaatgaagggggaaaattgatctattaaaaagaaaacaaatgcagatgaaaaagcaaagcatttctttttcaagtatgtcatcaactctcaacttcatatttattttgtcttcctgatctcttttctcccacaatatgggacatcctcatcactttacctttctgctcaatgtgtgcaaaatatattgcacacccagttttatgaaagcacaacagattcgggaggagaaagtttcctctgtgcaaatcttctaatcaattctaaagcattggtacttgggagttgatgctacttgagaagctcaggtgcaaggcatcctgatgactaagggttctgcaaatattttattgctgataaaggaggttctagaggacaaaacaatcatggagaagcataagtgatattaatcacttattaggtcaacttccaacccaggagattaggaaaagctcaacaaattaggccaaatcataaaatggcaccttggctttcaaccaacagctttctcctgaatacttgctgatagattcattgactgacccatttaggttctttgagcaccaagaa

SEQ ID NO: 279 - DNA, 440 bp, Homo sapiens
tcaaaggaattcctcaacgtttgtagcagggattctacagaccaggtactgctcccccggagagtaggaattatttatggggaaattacttacacaggggatggagtgaggttgcattatatgcacacttaacccaggcacatccaaccatccatgcttggagtggaaagatgactatggaaggatgtagcccaggtgattccaacaccctcactcaatgagaacagcaagatgagaaacgagatccacctcttgccttatttctcatgcacatctcaaaatgtgagctcctgatgcccttggtgtggttctagcatctgaggaagtgcatttttcatgtgacatggcccctagacataagccaactactttaggttgttttcacccactagagcagaaagcttttccaacaccggaaggaatcctctgtggattaaaac

SEQ ID NO: 280 - DNA, 1568 bp, Homo sapiens
ccggtgctggggacagcccctgtgggatctaagtcatcaaggaagatttccttcaggaaatgaaagctgggtggacgtagatggtgcgtaggagaagaacaggcagagaaagagcatgccgggagggagacggtgggaagaaccctcttgctagcatttaaggaacagcagaaactggcagaagccactgtggcctggttccagaggcctctgggggtggatgatgtgggctgaggcctgggggatcagtgggacctcagttgatagggcctggaagtgtggattgcagaatcggatctttacgtaagagcaatgggaagccccagaggcaggatgaggcatgatcaggtttgggtttgaaaagaccagtaaggcaagtgtgcaaagaacagaggggaaggaagcaagagaggactgagatcagctgggagctcctgcagagactagagatattagtggtccaggcaagagattgtcagtattgctcccagccacggaaaatttggctgttgtaggtctttcattgtgaaatgtaaacttattcttgggaattaagtattcaaacagtgaatgtggtaggcaggggctgaaatggttcgtaacctctacctgactgccaagtgccagcctccctttcatgtcatgaaagatacaagagagaacaggctcccaggccgttctacccccctttcaatcacacaaccagtgtgtgactgattgtgtgattggaaagggggtagagatagaagtaactggacttgggaaatatttaagcagcaacaaaatggaaagttattttgcaattacaagaataaactttcagtaaaactgctattaaagtctagatttatctaagggtaaattttgtgatatagggcttgtaggccatatgagaaaattttctaccagtaaaataaagtttgaatttgtttttattttgttgtaacaaaggcaataaagaggggaagtctctcaaatatttaaaaacttttatttttactttcagagaatttgaaggtatacagatgaaatctgacaagacgtgaatttataattctaaaaataatttcacagcagagagaaagcatatacctagatatgtacatatttattacaatataaagacataaatgtatatttctgaaatattctaaaaatataatgtaggaagaaatatttatcaaatacacagaattatatacagtatgcatttaggaaaagcagtagtaaaaatatgcacaaataaaccatctgtaaacacaatttttaagtcttataagtattgcatgcatttctgtgcattttacatttatgaaatcatatttttcctaggagttcaaatcacaaaacaaatgttatataacagatctctaacttttgcatgctttacacttgtcccatttaatagacagaaaaattatggcatgggaaatcattttataatattaaagtcacactgaatgtttttaagctgtgactaaactttgaaacattgccctgcaccacagatcctaaatcaagtactgcaaatattaaaaaaatgactgaggcaaattaccattagaacc

SEQ ID NO: 281 - DNA, 854 bp, Homo sapiens
tgcatgtctgtgcttcatatgcacatacacaatttaaaaattattgcttcatctttaccctaatgccataaaggaatcacatttaaaaaataaacaattttaaggtcctctaacaaaataatgccccagtgaatcactagtcttataagttgtttgacttcgttaaagtccttttaaaaatagaggtgttctctagtttcccaataatgtttttatttcaatgcaggaagaacgcaatttcatgggaggcctgataactttaaccatcatttagcttggcttacattattaagcagggacattttcctaagtagtacattaagcagagctacagtaaatggattgtcagtattactcccagccccagaaaatttagctgttgtaggtcattcattgtgaaatgtaaacttattcttgggaattaaagattcaaacagtgaatgtggtaggcagggcctgaaacggtttgtaacctctacctgactgacaagtgccagcctccctttcatgtcatggaagatgcaagacagaacaggctcccaggccattctaagcacctgaagatggtgctgacacaggtgaagtgtaaaccagcagtgaaccctgtagaatgccttggatcccagcactcagtccgcttccctgagttggatatgatgttagcaaataccaccatctagaaagacagtacagcttctggaacaattttgcagaagaaaaagtatcaacacctgggcctaaatattctttataagctgttgtatggtgtggtgtttgaagtttgctttccggtaacgtagaagccataagcaccattcttgcagaaaagttgaaatggctgttttggtcttggt

SEQ ID NO: 282 - DNA, 470 bp, Homo sapiens
ggtataccctaattgtatatcaaagaagtgtatttaaacaagacaaattattagccaaagaaaaaatgctaaaacttaaaaggtgtggcttactgtgataaacatgcatgctctttgctgaaggctggggtgtcacaatgcagctagaatactttccttaccctacttgattcagttctgttggttgggatgctcagaatttgacaaatttcataatagcatcagacacttggtggaggaataataatgtattcatttgggccttgttcagaaatttcatctgtaattgcatgtttctctaaataatctaccaataagcaaatgctccttaacttgccattggcaaacagcatttttttctaggaaaatcctagaaggtgctgctaaaagaacacaatgatagaatccgggtttaaacaccgacatgtcagcctataaagccatatgttacaaatgtcttatttccacca

SEQ ID NO: 283 - DNA, 610 bp, Homo sapiens
ccagcatagctcatccctcgtcattctcactaccttgcagaggataatgaaccgcctagatgctcacctgaggcgtattatcgctggcaaaacgcgatggggagttcccggctgggcaccagggtgcctgagtgtagcatctcaacaggctcattgtctgtggcctggatgtcgtatttgcggacaatctgtaatgcacacgcacacaaaaacagaattacccctctcttcttctgccttgtgaaacagcacagaacataattgcagaaaccggtaaaggttttacccaacaaagagccaaatgcagttgaagctctgctaatcggcgaccaatgcacattctttttccaacgccaaatggaagatgcgcaaaaggattaattttttccttctcctgaagccaacgttcaggtctaaactgacttgaatcttcaaaattgtcttcactggatcccaacacctgggtatttagcatgagcactgtctaaacacatgcagagacacatagtatttaaaataaccagaagagacctttgaatggcaaaattgacacaagttgtcaccttacaaatcaaaagccaaatccacaaatttataataatgatggttg

SEQ ID NO: 284 - DNA, 1452 bp, Homo sapiens
aacatgtcaactattctctaccatctctgcattcccaaaatgaatattttccagtacaaagtctagggagatctggtgaatatttgcaaagtgtatcttccaaggttttgtaaggtatagaatatacaaattctacttactcctttgggtaaagcatattcacccagaactgttgccttgtcaagagtccgagttgtaaatggtacactcggcgtaagcctgaaaagataaaatcaaagatgtaaaggtgagcacagtctaagttctctctgaagtgtcaatgggaatgcagattggattaaataaatgctgcccaagtgcatactcaaagaggcagcatgatcacagatcttcctaaagaagttgtttttttcttctcaataattgtatctcttgttcctctcatcttcttgagttagttaaaaccccagtgcaaggctgtttagtaaactgttaacgttggttttcccccttcattccagactaaaatgtgtatgtttccgtgctagcccttgaagcgtgatgtttgttctatgtttctccaatctactcttcacaaagttgacagtatccttctaatcctaaaatgttgtgagttttgttttcccaaaaggatgtaaaaagaatttccaaaaaatgttttataccagaggctcaaaagcaaagctttctctgtgtcctattatataataatatagctcttttgtgagcctccatctcataaccttcaatcatgcccctatcttaattagtgcttacagcgttcattagagtagcaagattattgaattaaaggggagggcactggctttccaagatttaatagaatttgcccaaatgatttaggaaatgagtgccagaaaagaaatatggctccaaagatttttttgcagtgtgataattgtttctaattagctaggggaagccgcccatgagtaggggaccacttgttttgtgtttacgagaacagtgttctaacacatttatattggctcagagataggctcttacctcatagattctttcagacaggcttttaaatacggcatattcctcaaatcttctgcccgtggcacctgattctcaggtaatacactttgaatttccttaagaagcttttgttgcacttggggattacgggataaattgtagagaatccacattagactgtttgctgtctgcaagccaaatggacataaacttgagtttttgtaaataactgcattaaaccactattagctgaaaaaaaggtgatgcccaccaccttattctgcaaatgtatcagtgaagctctttcacgcgtccttatagctacgcctttagacaaatccaatatataaaaaagcagacttatttcataaaacatatcaattaaggatatattttaaattatttactgagggaatcaaagtataatcctttaatcagctgctttagaacatttaaatacag

SEQ ID NO: 285 - DNA, 1010 bp, Homo sapiens
gttgcttgatataaaaaacattcatataaaaatggagtaaacagagagggatggtgatcctcagggtgttgctaatgagaggctttaagagaatgttatagtggaaatggacaataaatggcatttctgaaatttaaaagttcctttggccacaccctaaaaagtcaccacaaaaataaacaggcactacctacactgagggttacaaccacatgtaaacagccctcatacgagggtgccaacaccaaaaataagaaattcaaacattgagctgagtactccagctacagtttctgacaaaggcccacacccttttaagtggcatcttttatttcctctgcacaggcaatgactagagaaaaaatattggtggaaacagccaatgtagctttaagctacataatattcaccactagtagtcatatgtatttattttttaggccgtactttgctaatttaagccaaatatttcctgaaaatgatcattgtgtccacctccgcagacatgaagacgctgttgctaagtgccatgtgccactcacacaaatgagcaccaagtgcaagaccattcagagatgatggttattttattatttttggaagaagatgcctccaaggcagtcttcttcatgtcagaggactggcagcctcggctgcaaataaactgtagatgccattattataagagtctaatttacaaaacaggaagagggtgtagccatcaaattagatacactttcaaatggttctgattttccaaatgtgactttcagaatagccaggaccaaaaaagaaacagatttaaccatatcagtgagtccctcaccgcaagtaccaaatagagtttccaaagggcagatgactgtagcttttaccaaagccacgtaaggcagtctgagcctgtagggaaaactgcaggggctaagctgcagcagctgatttgaggggaagtggcctggaaaacctcaggggcacaaactatccttgattgacctccatggaacagacca

SEQ ID NO: 286 - DNA, 530 bp, Homo sapiens
tgggtgacactgtactttgatcactggaaggagccacccagggtaagcagttcaacaggaaagtgagcgaggatggattcccactttcaaccgccttgtggagcaggaggagaaatgagaacctcgctatctcctgatagagaaaaccctacctttacttcaggcaagaaacagcacagaaggggaagcacatggaaaataaacaactgctttacattttgcttagagactttaaggtgcatgaaatgttggacttaggaggaggttagcgtgcgccactcccatcacagctcgaactagtatccaagtcaattaaacctacctgaatgcctatggcaggatttgtttggggttggtctcacttagtatctgctatctcctagggagtatcggccacatcagagacagaattttggtctttacaatgagctgttttgcttcagttaaaatccacttgtcccagactctttgggactttgtttacaattctaagcagataaaaatattattggcttgaaagagagtatgcc

SEQ ID NO: 287 - DNA, 808 bp, Homo sapiens
acagtaagtaacagccacagttaggcactttggggtaacatgtgcaactgaacaaaatacttccaattttgaaaaatctggattctgtatcttgccagggcagagaactttactgctcctgaactcccgtagcagtttgcatggacatcatggcactcatcacatcctactctggctttttgtcactggggcacatgaagtctcctcctacccagagtttaagcacagaagcccgtgcatggaggcaccgtggcgtctggtatgaggccgtgcgctgaggcaccgtggcatagatgctgtgcgcggaggcaccgtggcatctagtatgagacttttcatttttgtggagttgatgctagtgaatcccagtgaaatgaatgagatgaattactatttaaaatctgtcatctaaaaatggtacagaccgttcatttagcaaactcaaatccagcccacccttaccgtttccaccgcagccagctggagctctgtgacagcagcatacaattctttctttgaaagccgattctggtgataaatgtcacaaaggaaatctgcactaggctgctgagaatacttctctaaccggttgtcgatacaagctttgactattagagcagagaagaaagagaggaagtcagctgaaaattgggatgaggaaaatcacagaagaaaacctcagtccaaactccttcttgcaatatctaaatagtcttttcaggaacactgacaatttgctacacacactaattatattattgccttcttgtcaagtcggcaaggatttttcaataccgacatgagcaag

SEQ ID NO: 288 - DNA, 633 bp, Homo sapiens
cttaattcccaaagaagactacagaaagcttgttacttagaatttgtgtatgctggggcaatccccaaaacacctgtgtttgcaaaacctaaatgtggtgatgaggctcaggagatcactccagacctcctctctgaagctccagacacgggggtgctgggctggttctggctggttgtgaagggcggccctttacctgatttgaaaatggtgtcccaggccagagtgtggtcctgccagaccttggtgttgaggctcttgtgcagctcgactggagtgaccatcatcctcccaaacgtgctcatcatctgagagaaatgcaaatgcctttttattctgaattctccttctctcaaagacaatgttcgttctggaagaggaacattctaaaccgcagcaccctgcactttttaaaaggctggaattacaaggacacccccggctctctctgcaccggtcctgggagcaatgcccgtaccccacctccacctcctttcaatattgaaggtaatgtgggggatgattttccactggatgtgtttgataaaaattgtaatcttatgacctaattgtaaaaaaaaaaaaaaaaagaggaaaaacgataactttcatattcacttcaatttctaataa

SEQ ID NO: 289 - DNA, 804 bp, Homo sapiens
catatatgcacataaatatactaaaatatataatgcacattaaaatgaacacttaactattgaaataaaatatgtgtgtatgccattttttgggaatcactgtgaagttctgtaaaaatcgatctgtaaaacatcaatcaagaaaactgctttcttaaagaggctgcttactgttttgatggccatgatgaagttcacagcttcatcccctgcattcttctggagaagcccaaatctcttctcatacaacacgaggcagatacctgtcatttaaaataatcatcactttacacaaacagcaatgctggagttggagtctatgtttagctggttattaaagactcaattctatgcctcttaaaagtgtgggattttctgagaaaaggcaacagtccaagaatattgaggaaaagcagagtctgagagaaaggggacaccatcactttctttttctagaaattatctccaggtccaatgactcatcacctcagagtgtcatgatcagagatccactgtcctgatcaagtcacacaggagatccaggggccctagcaaaggtgctgcagggtcgggtctgcactctgcctctaacccagctgtgtttttagagtcacttattggattctatctcctgacataatgaattggaagccattcaccagaggaagagaagggaagggaataattatgttctaaacacccattacacgccaggtactgggctagcacttcatatagggttttttttccttccatttcatcattttatttagaaggaacctttttacaaataaaattctcaac

SEQ ID NO: 290 - DNA, 734 bp, Homo sapiens
ctcattaacaatccatagttcaaggcataacttaagcacctaaaagaagcattaaaagggctgctctggcctttccctaggcagcaataatgcctgtttacaaaagagttgtcaaaagagccatgttttatccgcaaaatcacctgcaaaatcagtgagcaagtctgtgacgacaacttactttcaaacgaccatttgttcagttcgctgtacaagtcttcaacgtggcctctttcatcacagagctcatctattctgcccataaaatcggccaagaccttcaaagaaaacaaccgcaaaagacacattttaaagccgttgaaggaaaacaaaactttaaagctcactgagctaacttcaggtcttgctacatcgcatattcactggccataatgttattcatcctgaagtcacactaattatatattctccctgggaacccaccttatcccctaatgacctcgtcctgggttatttcctgagcttttcctgaagccaccctgaagcttaagtttcagcttttgatctaaaaataattctggcaatttaagaaaaggaaaacattttttttttctaatcagaatgggggaataaaaccacaaaggaatcagctaactgtccctgttggcccagcatctcaaggattgtgttgcagcagctatcctgaggtgtgcccttccacatctgggcaagcaaacgtctctttattggttggtggttatgttaagcatgtt

SEQ ID NO: 291 - DNA, 3124 bp, Homo sapiens
ctcattgtgatatgactttaaaagagggtggaggagggagaaataagggtttggtggggaggaggctgtaggaaggaatggagagaaagagaagacccccactttgaatcacccgaattgcattcttttttcctttgttctttgtagctgtgacttgaagctccaccaatatccctatgtccccacgagccccaggaaagctggccccagcctgcagacctcattgattttgttgtccagcttcatcacttcccctggtttcattagtttcttttgaaaggcactccggacccgctgccagtcttccccttccctgtgagagaagcaggaatacatttagagcacactgaaaagaaaagaaggagatgcagaaatactccagctgcaacttcaggaaccataaaatcaaacaaacactgagaatcatgccaagaaatagccagagaatattagcatcagaatatttgggataaaatagtgatcatcttttgacaatagtttgacaataggatgaaaaagcacctttcctcctagtcaaagattgcaccaaaaagttgaagtccagataatttgggttcagggattttgaggtgtccttgcagggagtggggctgggaggcctggggacaattcctagcggtaaaagggggcatgtgaacaccccatcaccagcaactcagatctgtttgagggaagaatcttgtcttctttcaactcattggtgtgggcttcatatttacaaaatatctcagatttagaattttgccatcgcctccaaataataacatacagtcagagagtcactggagtaataaaaagccttttgcgatcgtgcacttgtaggcacctgccccatagcagaccatacagcctgtgaagcaccgtgaattaatagggtttttaattccagtcattatatcctggaaaatataacgattaggcattacagtttgggggtaaataaaggtgctaacttgttaaatgctaacaactaaaaagcagaagaatcacatcccatagtagcatttgtcgacctaaaacacaactttgatatccctccttattccacctttacaagtagaaataaggcatgtcccccaatcctctgcagaaaatgtcactgtaaaaagccaaagaggctaactcctcgcttttgagcttacaaggtgtttcagggagttttaagggataattttgtttgtataagatgtttgcctggtacgctgacttcagaacctcatcctgcccaagagtctgaacaccacagttggtacaaccctgttttggcgtttctttgatgggagggtgtggccctgccctgttgccagagagaacgcaggtgctgggtgcacagcacggcttttccgtggaccgactctaatctgtacaagagctcagggttgcgatggcacgggagaggggctttggtatccgccctacgtaagaagcttccaaccccagggaactctaactccgcctcttcacaatttccaggcgccgtcaggctcatcaggtctggccgcatgcccaggtccctcggattggactcacaggatcagcagcccgtagccttctttgcggtagtcgcgataggccttccacggtttgatctccagccgctgcgggtacgcgctctcggtgcggtacagcgcttccagcaggcatggcgagcccaggtgcaccgactcaaaggaacccaacttcatgcggaaaatcttgccatacttcttgtggtactccacctgcagccggccgggcacagcgcggtgtcagcgcgcatcctccgccgtgcccgaagcgctttccctcctcccgcctccttcctcctaggggaccggggaccctccctgcccagacgccgaagcgcaccatgcgcccgaggcgcgcatgtcggggagggtttggagcgccactgggagggcggaagagggaggagagagtcaggggcgcgaaaaggggtttaccagggtgtcgtgctgtttcttgagaccccctttccagagaatctgcagcaggctgcccagcagtggccagctggtggggcccggcagggcggccgcgttctgagtctcgccaccagctgtcagcgggcagactggcacctctcgcggctgaggggacgtgtacgccgtagatgtcaccagtctcgggggctgcctcggactgcgcagctgctgcaggaaggcggcaagcgagcggctcttgctgatgggggagctcatggcagcgggggacaccggagcgcgggaaggcaggaggatggggtggggcgaggttggtacgaggtgctagtgggagtcggggcttaacgattctgggaaaaggaagcaaagagggccagctggtgtgatggagcggggtgaggcgggacaggcagcagaaaggacctcggcgaggatgctcgacgctgcaccacgcgacagcctcagagcattggtgcctccttgcactggccgcaggggctggaagagggtggccggtgtctggggacctcttgaaaagggaaagctgggagtcctcctgttggtccgcaaggctgacctctagggtctggctggagccacggggaggtgtcaaggagggtagatgagatgctgctggcgctgcgtttcctcctgtccctctccatgttcctatgcccagggaccatgcatttatggagacagagcatgccctgggtggccaatgagcacgcagaggagggcggagtggcccccggctggccagactccgagggacgcgggacccaggggagggggggtggaaggaggatggagtcagcgaggtgagcgagggcgtccgggcctggggtgaccggggctatgttcgctgggcgcgggaggtggggtgggggcggcagactccaccccggagataacccccaggaagtcatgcgaagcccggagttcaccgggtgtgcttcgaacgcgcctccccgccctcccccggcgggcaggagccggcagcggcggccgtggttgccgcccggcgcttgcacaatcgcgatgccgggcgggcgaggtccccgagtgcgggcccagaaaagctgccggcgtctgccagggccccggggagcccgggcgcctcccggggagccagatacccccagcctggactgaagtga

SEQ ID NO: 292 - DNA, 769 bp, Homo sapiens
gttacttctttaggaagttaggaaatgcgccttgagagcgtggcttgcaccaacgatgcttgaattcaggctgggccacctcccctatgtccactgcccgcctctgttcttctacaccgactaccttgtgcaaaggaggggcacacagagcttgaaaccaccgcccccagtactccccctctcccccaaggtgcgtcctaggcaggtccagtgacaaacatacacaatttctagagttaccgcggctggcaagagtagaactcgctttgctaattcaggaacggaagttggagatttttgttgattgttttaaagtggctcgaatcctttcaacctgatccaatacaaaactaccaccagccagggaggaggggagggacattctgtttcctcgccctgcttttcaattacgtgtctcagtcatttttgccccaagtgttggcaaatccttccctggtaaattcttttgtaagcctctagtttgtttcttaaaaatcttttgcagtccaacttaagctttaacaccatcatttctgatttgtctggaggggctaatgactgtttatgttaataaaaataatagctattgatatatactaaactttatgaatcttgtacatatttatatatacattgtatggtatatatgttacagcatacactatagattatgttatatgcaatacacactaaatatacataatatagtatagattgcatacagtatgtagattccatatgttatataatattctcatgaaagctttct

SEQ ID NO: 293 - DNA, 850 bp, Homo sapiens
tagctctaaacagaaggtctatgtttttcactactgagtaccttgattctggtgaggtgcttggacacagtgaatggtctattgttatttcaactattgagtaattttcccaattattctttcttttccttctcttttggcagatatgcacaaggagaagaggaaataatttcagacttgctaggtttttctaagagtttcatgctatatagctttatatactctaaatagatatttaaatatatgggcaatcattagttacatgatagctaaaaagaaaattcctgtttcagggatattggtttctcatgttcagtggagaaaatccccagtaatttttagaccggattgcagaggaaagcaagactagttctttgaaacttcattgaccccaatacatacctgtccttgagaagtatgattaaattcaaaatgactatttttgatcccgcttccaggaattcactattcctcatctgtcctcatccttcactcactacttagcctctatgagtcatccggatagggatcttgtcaggaattactaatgagagatcttgaaatgcctcataaatgcctgccatcattactgagacaggctcaggccctctgttttgctctgggaaatcttaccaagtcctggaatggataattagacttcagccctcataccaagggaccacccatgacaacatgtgtgtgtgagttcacacacctgtgtacacatgtataatgagggtggggtggaggagcctgtaggagttcaagggctggtttctctgcactggaaaatacaaaacactttcaagtatatgcaatagtaatatagttttgtgcttaaaactgctta

SEQ ID NO: 294 - DNA, 1213 bp, Homo sapiens
tactattgcaaaaataacagcgattaagtgccttacttgttgtaactgtacttgttcaattgagtctatctttctgttaaacttagctcctggtaaaaaggtgtgtctagttgcaaatcttatatataaagaaacattttcttttgtttttttcctattttcaaaatatctagtaaaatagagatctgtgtgagacagatgtgcactctttaacaggttatctccacatgaaaacagagaatttattaaatgaattaatatgtgtaaaatatttgggaagatatagatgtagtataactactgatttaagagtcaagtgaagccagctaatgaaaaaatccattgatttttttaaatgttccaatggtgccatacatgtttcataattcagttttaaaattacatcatcacatagatacctattttatcctttcttgcatgatatgacttggctaataccatcagagtgaaaattggggaaattccatgacaggattattattgttgattaatttggacccaaagtatagtttgctctgctcctatatgtcaaaatcctgcctccacataccatcttattggtgttgacttggacagcattctgcagcatgattgagcttaggatgcatttttgccagagctttaatatgaaccaacaagcatacaccttgataggaaattggcacctaaaggcacctggtggaaagtacctctgtggttagatgagtaaactccagcagtgaatagggatatccggttttttgtttatgaacataaagtggcaaacaaaacaattacaagccaagaaaagtctggaagtgtcctttcatctttgagaaaaaaaaaatcagttagcagagtacttacgcagtctttgtgcagtagcaattgccaaacacccctcacaatccagattttattacttgatttttcaccaacagagaacagcgatgtaacctccttctgatttttgtgccatatgaaacagtggtgtttacagtattgaggaggaagtttctcagagttcagtcctattgcagcttgcatggaataatttgggatcttacttgtttatgtgaatattcacagattcctttagaataatgggactttccattgaaaaaaatgtaatgtgaatttccagtgatttattgatttgttttatactctgtccagttagaattctttggaagtggaatcagtccagagacgg

SEQ ID NO: 295 - DNA, 699 bp, Homo sapiens
aactaacatttgagctcagacttaaattgcgggaaatggtcagcttcactaacgcctggaggaaaagaggcagggggcctctctcagcatcttgagctcaaggtgtaaagagaaccacgaagagaatagcacacaggatgctgatcagatgcataaatatatttaatatttattctaaagacaaagaggtcatattccctactcccatctctaaatctaattatcaaatggctcctggttggcatgctttcatattgcagaggtgttttattttttcaagatcattttgtttagtggcacaggtgtgaaagttaagagtctaaatagacatgaagctcttaaaataagaaataaactgaataacgtcattaggattaccttctttatttccaccagttcacaggtgcaacaaggttctatgggctaagcataagaagaatgtaaatgttggtcaatttctcaaacactgcagattacatttagaagttatttgaaggccatttgatcagccaaacacagcacagacacccttgagcacctgcaaggttagaagcacatggctagcctctgttcttgtccctgaggaatctacttgctctcaaatcatgtgtttaaaatgaaacagagctggagtctgtgtgatgaacttccttgggttttacctgcccagcaaccaagatcttgtcttctgattgctga

SEQ ID NO: 296 - DNA, 558 bp, Homo sapiens
attcaattgataatatatggcccatctgatgtcacgtgctttaatctggtattatttgtgtttatcacatatgcttccttcacaaatcaaccacaagctatctgttactttgtctttccctttaggtatctctattggagatgaacgcatgttcaatacacgtggcctgcctgagtcattagcaaagtgtccaacaactctgaggtactgaaaaatgaaatgactagttaatgtagattgagagtccacatgccagtcacatctcgtctcacttaaatctcccaccaaacttctaaaaaagatgcagccgagatcatgaaactcaggaggacaccaagtcacacagcactcagttgtgatttgaacccccggggatccctgactcctgagccatcacccttgttcacattgagactgcctgtatccctgcctttccacaaagaatattcataacttgtagggcttaaaatgcgcgcccatgacttggatatgaaaaagaataactattttctatgactggcttcatctggctgtgtaacccctattcctgttgtgcca

SEQ ID NO: 297 - DNA, 1657 bp, Homo sapiens
gggactctcgtctgctttttcacttaatccagcagtttgggaacagcatcaggcctcttgttttgtttccagttgcatcctcttaacagcacgctctaagggtgctttatccaatattgtaaaaggaaactaaagcaagatttgttttgaggattgcttggtgcccctttaaaaaaattagacaccaacccaggaaaagagttggaaaaaagtaccccaaaattttcccatttacctaggctgtctttaagaccaatatcagtcaccagcaattaccttttgttcccagacaggaaaattgaatgactgcatcaacgctaaaaagcttggattgaatcagacactttcctcagaagtgaaaaatgcctgaccacaagccctagttaatttaaggccacttagatggcgactccaggagaattccaactcagtgccccaagatttctcagggacttggatttctccctaacctactggaaaagaatttgtcatcagcaaagctcttccgtagagaaacttgagataaaatgggtctttcaacagggctgtgattgtgtgaagggatataaactggcaagaattgtgctcctcattcttgatggaaggttaacatgattaggatctccagaagtctcatatagcaagattaaattctattttgcatactgaagtctcagatactcaaatttccactagcatgttagattctcagtgtgctccctttatgtgggaaatctgtaacaaccacaaggcacactcaatccttcctcaggcataggcacacccagacccacccacatgcgcacacacccatacgtccacacgtgcacccaggcacccgtgctgcatgccctcacatgcacagccccacatgcaagcacacctccatgcaactttcctcaccaacacgaacatgcacccacattacacacccatatctattcccccacatgcacctcttcccacagacacatcttccacacatgcatgccccccgcacttgtgatttaatggcacatatgattcagaatgtctgtgaagccatttccaacctgtttttgtaataacctgtgcttctcagtccaaaagatagtggaacgtatgtttccaggaaaatatgaaacaggaatttctcaatctcctagcagcatccccaccctgctgtactaatattagtccatgttgccaatagcagcagcccatgtcagactggctgcctctcctccccacctaatccccacttttcttgtttgtaattgaagaacaaccgactgtatctcatgctcgggctgaccaatgagtaagcaaaagtgttatgcggggagacagccttctaattctgcagacattattaaaataatccaacacaggtacccgtgcaatcaattttcagtttctaggatgagagatatgtcaccttgccttcaaaaggccaaacctggctcgcttcattggctcccttctcaatgtctgatacaggacccaaaaaggtctatgcatcctgtggcaagaaggtggcatcctcacaatctgggacctgactctggtgaaaagtgttgtttagggaacagatgcttgatctttttactttcgctgctcgccaccctttaagaggaaaatcttccccaaatctctcttcaaatcaaatgccggatgt

SEQ ID NO: 298 - DNA, 791 bp, Homo sapiens
gccaatatggtgatgcctgtctagagcctggacttcacaacccagtgatgtcaaccacacttattccacccatcgtgcctcgagatgtgggtccacgtgcagggggggcctctgtgcatggtggtcagagagctcgccatccctctttgtgtgctcttacccagctctccaggcagtcaagggctaaagggagaggtaggtgggagctcccttgagcagaggggcctttgtagggtgatggaggctcaagagggaatttcctgccctgttctggagcttgggcccccagtcctgcctgaagtcccagggtccacagtggcacagatagagacagctttccggaccttggagaagaatctcagtaataaccgggggcagggcggggtgctaattaccaaaggacactcactccctacagagttctcctcccgaacacaacttgatggaaggtaaacacccacacaggacatttaaataatgcccaagccggaatgcgttgataaccagtggcgtggacattcggcagctttccatttccagaacatactcgactgtggagaaaagacgatggtagctacctgagggccttagcatttgagccctggtaggtgagggaatctgtcagagtgaataataaactcagtactcccaaagaccacagcctcccttaatggtgtactccataaaccctcctgatttttttgcaagaattccacttgctctctagttctgctacttacattttccataggtagtggttaagaccagaatgagagaaacctgcttttaag

SEQ ID NO: 299 - DNA, 954 bp, Homo sapiens
taaaagattactgaagggaatatttatataatatcttgaaaagcatgcacctagaagcaacttccaagggtcacagccacctggttagctttagagaaaaaagtgcctaaggtgttacattttcaaggatgtttgaagaatgtgagtggaattttctatgcagtttcacagggagagcaattatttgggtgtccttcagaattcaacactacatctctctcagtccatcctaatttaaggcactttccctgctgcataacttcattcatgttagttctgcttctagtggaaatggggaattcatatataatagtatttctaatgtttaggtttaattttttaaagttgtgaatttccaagctctcaccatctccttagatcttcacaagtcatgacatatataccaggttgaccaccattttacaaataagaaaattctgagagcagagaatttaaatcctgtctttattcagctcttaccataatcccccattttccatcttgagtatagtgtctttccatacctttgttgattattgagttttccttacatttagatgacaaatacgactccaaaatacacatttatcttgagtccttcgctgaccaacatttgaacctacagtatttagagaaatcctaaaacagacatttgcactaattccagaagctgaaggggctcaaaactccgggctctcagctctccagtggctagagatcatgtgactaacctcagccaatcccatgctctgtctggaggtgttcagtgtgcaaagaaacattgcagacttcagatacatttggtggcagcagccacagaattcagcgtccaatgccagcagtctgttattgcttgtaatagtgtccatgaatatgaatcaaaccagactttccctttggtataattttggccacagtttggctgcctaatttccctagatgcctgcttattta

SEQ ID NO: 300 - DNA, 827 bp, Homo sapiens
acatattatcctcacctctgatgcatacttgctcacttaccttttcttttctcaaaaccacctctcataaaataatctgaaattccttattgatctcattcaaaatctgtttctctcacaggcgtatcctcaaatgaagccttgtctctgtgaaattcctggtaagagaagttgaggcatcaatagtggatcaggaggtatttttaggggaagaggagtctcagtattcatggaactcaatgagacctccacctacacaaggccaaggctgcatatggatgtagagaaataaaactcagatgttgaaaagtatctgaagagatgatagcaaagggaaattatcttttatctttcagataaatcgtcattttatggaatgccacaggaagaagttttctttacaagttctgaagacttgtgatgaatgagtccatagtttcacctttgaaaatgtccctgggagtgtcaaccccatcacttttacttatattacactcataatcagttcatctcgccaagaaaaataatattatcctcatgcccaaacttgtgacttgatttgaaaaccagtaaatcagaaataaaacttcccatgtgtttttttcctacatgaatccaagtgactcagatattgtgttattcaataagactattaccatgactcaggtaaaagggccgtttatattttctgaagtctcaagtctagggtccaaaataaaactagcatcttttatagaataatttttctctaaaatgaaatgtgtatgtcacctggttgtcaaaatccttatttaaatctttaaggagaaaagcaatggtttggagag

SEQ ID NO: 301 - DNA, 551 bp, Homo sapiens
tatgcaggtaatataaggctctgcttcgcttctggccaaaacttcctggcacaggaggacatggttctcagatgtgagaacatgttctgtcttctgcaggaaaccagaaggggttctcccttctttgattgcaggaggaaagaattctaatggaatccatatgttctttggccccatttaaaactccacactctggaaaagtagatggtgtcctggagtgaatcccaaagtcaggcccactggaaagggtcactgggctttctcctgcttcagtggcctgggattttaaaagttggaaaagtttatccatacaactttattggaaatgattgttttttattctattcttgcccttttatggtataaagtctttgcttttatgttgttaattttagatttaggcttctttgatttcattcacttccttaacaaagtaaaaagttggcaactctttgaagttgctgcaaccatattcccaactacagcatccttctatgagcctctgctctcttaatgggtatagcccaagggctagaaatagaccaattctt

SEQ ID NO: 302 - DNA, 770 bp, Homo sapiens
ttttactcctaagcactgatttgggatttgagaaaaattttacaaaaaatcagacttttactcctaagcactgatttgggatttgagaaaaatccagctcatccgtctgatctggcctcttgatctcagaagctaggggagaccatttttgctccacacataactaaagccaatagaggaaggtggtttgcagaggtaaagaggattgaagcagttgagcagacagcacagaggagaaatgaggcaaaggtctgatgtcctaatggtttccatctgcaatctcttccaaaggcactttctgatcaagtagcaatttggactttttttagttgtaagcaacagaaactggcccggctatcctcatccataaagattgtattgcattcaaaggcttgcaaaagtgtggctagatgatcaagcttggggtgtggggaggattccaaaacggaaacccaccactgatgcatggccagaaccccccaccagaggatcctgctgtgaagaattaagagccgtggatccatcgacgccaggtcatctacccaccctctggctgctggcagtgggaagagcgagttggtgcccttccacttctgtagttgatactggggtcctgattgctaccggggtgctctggttatatatcacactccagacttggtggtgtgaaacaataacagtcttttattattatcatacctcatcatgctgggagatgactctcatctcctcactgaggtttcctgtgcagttgcagagagttggtgacc

SEQ ID NO: 303 - DNA, 1218 bp, Homo sapiens
acaattgcctcaacacgaaggaatctacttgatttcctaaaactagaatcctggttgctaaaggttccataagacaccccatatattgcttagcaaatcaccattcattgtttaaagtagttcaaattagtttcaatttcttgcaggcaaagacacccaacggaagcattggattccaagacattgaattccttgaaaggagagatttaaaagtacctagaatacaaccttccatatgacatttattaaaattggacaactatactttgagaaaatgattgatatgaattacagtgtgattgacctatggtctcagatccaaaccgtaaaccctacacattcccacggctaatcgttttaggaatagaccaatccccagatagtaagtgaagactcaatggattttggaagtcagtttggcacaaagaccctggaacagcttccggggctagaggtggagtttcctgttgctgaggtggaagatcacgagacaatcaagaaacatgcctcttccatggcttgaggtcaagtctaagcttgctcagtatctgttactctctgattgaacttccctttaattctcccatcagccaagctttgtctctgaggtcttataggaagtttttggcaaagtggcagaggtggtgaaggacatcatgaaaaacctggagccaatgaagcagaaagacttattctggaatacatggtgtggcatcctagaaaactctagatatgacaggtaaaaacctgtggagggaagagcgcgttaacattcaacattgaagtaagttaacctcaacgaatggttgtttggttgacaaaaaatagacccaaacagagtgatattcagccagtatcattcaaatacctgtgggttatctgaacaacattcttgctttcaatttcttaatgctcaaattgcttagacattttttctttcccaaacaggtgggtaaatctaacttttttggtgtctctcttggacatcccagttaatgctgatagttaaatttatactagacaatcccataggaagctgcccctcagagatccgcctgcttcctggagacacttctgacattcttcaaaattgccagataacatttgaatagctctgcgttagaatagccaataacccctgcattagaatagccaatgtaatcactgattcttcagctgcactccagagccttagggaataagttgcatgaaaaattt

SEQ ID NO: 304 - DNA, 893 bp, Homo sapiens
cagaggccaaggccaggattatgttcctaccctacccttaaactctgggtcaaggtgagagtgttcctttaccggaatcgaaggttcgtctctcttgctctcatttgctgttttcaggctgatttttccagcaatgagtaacagcaggggccatccgtttacttcaagggaaaactctcctccccatgtgcagctggtctgacccggttctgcagcaggacaatttgccaagactttgatgcagaaaattcccttaaggggacttatttggtcgtaagtatcgtgtgtgaaagacatcaatatttaagtcctggttgggcttcatcagattcaaccctgttcttgtccagttttatcaaaatgtataaagtctaatcttagggaacaaatgtgcagtgatgctaatgaattttaatagcattggacgtctttgatgccttgtcttatgtcctcctgacctatcttgttgctctggcattaagttgacaaacagctgtggccaggtgaacctgacctcagtagtacctcatgtcctggggcttttctactggccacaggcagcacctgcagccatctagcgcaagaccaaacctgaaagtgcaggagaggtaacacctaccggggcaacccttggctgaatggggctgggtggataaatgctgtctctgtagtgaggacagttctgagggacaggtgctggagaccagagggtttgcaggaggagcaagctccagcggcccacagggtcatcagcccagtggcagcccttggaacagcttcctatcttcacctttttcacgtttcctccagcttccccagatcccttcccaccatgaactccctgcagcaagccctcgtctcaggctctgtccagacgttaatgtagccgtgac

SEQ ID NO: 305 - DNA, 1331 bp, Homo sapiens
ggagaactaattcttcttgggcagccaatcaaatgtggagtctgataaatacaattttgcttcccattccccatcagcaaagagattattacaaaataaagtctgtaatgatgagttacagttggatataaacctattaaaataatgcattatatagattaattccctatgtatgcattattcaagtgcttttaatacagttccccccctttggggagtgggatcttaaaataaaaaggagaaaagttttcattgctatgttgtcctatatatcttgtcaaattatgcaaaaaatacatgtagacttgtttcacaaacataactagatagcataattacttgggtggtactaaaatttgtttgaacaaagttagttctaaaggaagtgaggcaggattctttttgagaagtataatatttaatttttatgggtatgggaaaatacagtgtagatgagaataactacgatttgtatccttattttatcagataacagttatataaggtatagaaacttagaggcattacccaattgtcctgagcctcctttcaccacctacaaaatgaaaattatacctatagtttgaactgaattaatttgcaaaattaatttaagaacccaaagtatatattaaatgcttaagagaaatacagcctctttttaaggccattgacaatttagggactgcccctcctcctcatgtcttcgcagacagcttttccggagcttagcaagtggtagctcgcaaagtactgaaatcttctcctaggatccatgtcctacactgctacaagaatcactgattacattggcaattcaacatttattaggtcaaatggaatccatcgtagccaggacctcagctctccttcagtatgctcagataacacctgaccgaatatgggaagaggctcattgtgtaaacacaaacgtggaagtgccttttattaaaacaagattttacctgtagaaagatttgagcattcaatttgcctcgaggtagcatctttacctggaaatgaaatctcattctgttattggagccaatgtgtttatgtcaccattggatgcaggaacaacttaaaaaataatagtatacatatgttatgattaactctaaacttttgtttactttaaggataagctaaaaaaactcactattgtcaaaaatagcttctgtaatttgttcttttcacaagaagtaaaattcttgtgttattttttattctctgtaccttgcgaataactcataacttaggagttcccaagttatgttcattcctccattgcaatctctgtcccacccttccctttctttccatttccgttg

SEQ ID NO: 306 - DNA, 470 bp, Homo sapiens
gttaactaatggtctgttttataaaggtctaaaaacattgtatacgttgaagggcttttaaaaatgctgtacttttagccaggtaaaaattcggttaagaattcaaactagcaaaagatgattctactttggcccaaaggcagtggtttcctgggtttgtgtcatcttgctttgcagcgtgtagacaattcttcaggagttgcagagagaaaaataacatgccagattttggggtcacagtgccatctgctgaagaaaggagtgttgctcgaacaatgagtccacatgatcacaatttgcgtaagtactaggcctagccaaaaaacaaaacaaaacaaaacaaaaagaatgcaataagttatggactcttgtacattgtagtggagtgaattcctcaacagcttacgctgtattatatattactgtattaatctctaaatacattatcacttatttattcatgcattgat

SEQ ID NO: 307 - DNA, 625 bp, Homo sapiens
gaggctaggccctggtaagaaatttaagtgcaatgggaaaacaatgaaacatttcaaacagcgttatggaaaaaccatttgcaaaattgtttagctaaatacaaactgacagtacttaacattacccagcacagtaagattcaaaagaagtgcaaaatattcggaaggtggatttgaatgatttaagtctggggaacactgtcatgttcctcgggtgccctctgcaggcgccaaaccaaattgctgcgtgatcctggggatttgctccttcttgcctctcactcctcatggccagcatggaagaggaatctgatcaaggtttcctttttaaatcttagaaccaggagcctggagcaggtgttgcaggttttggagggcacccaggtgcgtactgccaggaaatgatgtgataacctcattctcgctttgtgacaaaatctaaattaaactgggacatgtctggacaattttgtagcttacataccaattcaaacaggttttttttttctcttcattttccagtcaatatactgaccatttctgtccttatatcttcctcacggagtgttcctgatggtagtcacacagtcttttattataattttatgagttcttgttggagcga

SEQ ID NO: 308 - DNA, 845 bp, Homo sapiens
ggcataagggaaagtctttccaaatggtcattgttgattctcctccctgacctgcaggatccacatgcttccacttgtaccccatgcttctccccggagagccagggacagtccccagctggagaaaggaccagaaacaaaggtcggaaatgctccacatcaggaaatgagaagatgctcagcagacttgaaagtccctgtaccatgcggacttgcagaacgagtttttctgctaggagagagattagctcaaaggatagcaaggtctggggagaggagagggacaagaatgatgagaaatagaatgagaaggaaaacctctaaagcaaggggaagataggggcatcagagggagctgagtcagcaccaagactgccaggagccgccactgtcctctgtccagattcaatgacactgccctgtgcccgcagactctctgcccagtgccttttctctctgcttttgtatggtctgtgtggggaactaatgcatggagaagcgtgcaccatctcatgataatgatggagcagccaaagcctcatagagcatccgattggagccatggcttctttgagcccagccaaagggatccagcccctacctccatatcacctgttagaggagacagtgccccctagcccttctgtctctggagcccctgtctcctggtgcaatttctcagctcagtgactagctaaccaggcacttggacattaaggaagcatggtgatgaataagtgggccctgcatgaggcaggcttctcagggtttcttggcagcacatgtattagcatttggaccaatctgattttattttattattgttatttacatttatgtattta

SEQ ID NO: 309 - DNA, 514 bp, Homo sapiens
caatgtaattttaaagtcctaaaagaatttaattcactgactcttcagtatgttataacctgaacttcttggctgattttatgggcctcagtgttagacagcacctaaggatgtgtcatgttaaagcctcttggtttaacctgtctttgttctcacctgccattggccacctgctccaccccagcagctcccacagtgaccagctccacaccggccatggtgtgcagacttgcagggctgcctctccgtccagttggctcgtgcttacagcctcacaccttgttcctccacctgggggcttccctgtggaaggctgaggtgagaaaaattatgggagcctcaatgagcaacctggaagtgtctgggagtgaggtccccgtggggccagcctttgaatgggaggcaggaactggcaaataagagttctccccagctgaactctcctgtgttctggttaacacagcctcttacaggacagtccccagagagggagcaaccagtcgtgcttgatacc

SEQ ID NO: 310 - DNA, 616 bp, Homo sapiens
gaactctcattattattatacttcagcaaaaggcaaaggttaacgtaggtgagagtttaggtcccttctggtcctaagatctatgcacctgaggattgaagtgcttctctctctcaaagcccctatgctactttcggtccccaccatacaattacatttcctcaaaattcctgctccgctgttcctcagctttcaactcagccatttctcaataaagctttgaaaaagtcagaattctttctctctttctctctctccctcccccagtttggcctcaccaagttctaaaacatgcccagatctggcccctgccttgcaccccagcctcgctccatgctgctctgtcctttctaccatgtctcaccaggctctttccctctcagccctccacccctggggtccactttcgtctcctctccccatgctgaggcctcccattttctcttagcttagaggccagctccagagctggcccccacccctcccctctgtgctctgcctcagcacctcatttatctccttcatgcacttggtaccatttgtgacaattttgccctttatttctgtctccctctccaccatttgtttcttgcagtgcttttacattgagctctgg

SEQ ID NO: 311 - DNA, 953 bp, Homo sapiens
aaaattacattaaaagataggagtacctcctttacaccacctgaattatcatggcacataaatctcacaccctatttgccaaggccattcgttcctagctgttttacaggtaggttagctttctcaatgcaagtctgtgggacggatggagaaaaattccccgagccctttgatcctgccccagctgggccccgccgcgctgagccttgggcgcgccccctgctgcccgcggccggagccgttcgccacacccccgtgtttatgtcggtccacgggggttgcctgtccctttaattggcatgtaccaagtccttccaggtcacatttcctccctacgtcccagccgtttggactcactggccaaaagtccaagaggacggaatgtggagacagtgttgtatttttgcggggagttctaggccgaccgggagcgagagaacgctcgggggcgaagcgcgccattgcggccctccccgccgcctgcggtagtccagtcccaagatggcggccaccatgaagaaggcggtgagtggggagctcggggctctggatgctcgggcggcgccggatctcggccgctggggcccgggcgcgggatgctgggggtgcgcagctccgaagcccggcgtgggacccgaggccgaggccgaggccctgagagcggtcccgcggcaaggcctgctcgcgcctggcgccctgagcgttttcctaggcacctggccagccgaggcggggcgccggggctggggccgggagcctcgaaggacgcaggtccgcctcccgcgatgccgagggtgcccccggggagtctgaggaacctgcagccccggcctcgcccctgaggtgtgggaagccgaaggtcccgttgagtgtggttggccttgactcgggcgttgcaccggcatgatcgcattagcctcactggttatgggtagctgctgctgggagcgtgg

SEQ ID NO: 312 - DNA, 494 bp, Homo sapiens
tttaatacaaggaaggcccgatggcagataatcaggggaagagagtttgagccatgatgggaaaagaacttatagaggggtaggtggtggccaaaatataaaggagcttctttaactttggaggctttaagagtcacatgatagatgcagtgtcctcctgtagatgtttccagtgttaggaacaattcccgatagattagcttgcatgtacacttttcccctttgccctcactaggagaaaacatatgtgtatgccagtgagtgagagtgaaacagagagagatagccctttgagtttaattaaaagcaaatcgtacaatctggagtactttacgtttgtaacacatcgtatctctcaactggtcatgactttgctggggagagtgtttagatgagatgattcagtcctctcctctctagagttctgccttctaagatccagttcttgaccataaggagatctgcactttgatttctgttcattatcctatata

SEQ ID NO: 313 - DNA, 1192 bp, Homo sapiens
ttacccacttcttgccaaaatgcagcttcaagaaatgtaggaatgttctaggacagtgagactaaaacagaagcctctgttagccatcaaaggcactgacatcttactgtctgctgtaaatggcactccactgggcggcatgcagtatatttgactcacacatcaactttagcccttaaccccagtgggaaaaccactgtaaagatctggataccaggggccacatgtgtgctgatgcctgtggtttggtggggctacaacaggaaattcctgctttggaaagacagaaagcagatagccaaattctctctaccacattttggaaactatgtgtttgagtctgatcaagcatgatttagattcaaattcagaaaccatgtattagccttagttatgtgccaggcagtcctgcactggatccgttcatgtgaatggctctgttgagccctcaccaagacaaatacatctataaatgcctgttgggggttcaatatttaaacaaaatggcatatactcttcaggcaaacaggaactcttcagaattctctgctgtctatttgcgtagggaattgacagttctcacttaggcaaaatgacttgtgtgccaagatatagactttggtttcttgagcgtagctcagtgttccccaacttccatattcatcaaaattatgcatacggttgaacactcaaagctagacatagtgtgatgtaaaggattttttcaggctatcttctgggttgttgaggtggggcataatgcatgtgaaattgtttcttggaatgagagcctaacaaaggggaggactgtgttatattccgaccactgagctctgtattgcttgacactgcctttcaacctctgagaaataaaagttcacataccttaagtcgatggtcatgagagaccaggtcagggatggagtgtgaatgttgtgagctcattactgttactgcaaaagagccaaaagtagtgtttcagtatgaactatttttatacacacacaaatatcttttcttctttaaactagaatcaggtgctctggttttcattttataaatggaagggaaaccctaaggagagtctggttttatgttttagctttattttttaaaaatatatggtacctccttgagaatctgatgaaagcagacatcctgctgcctcttccagatgtgcctaagcctgtgt

SEQ ID NO: 314 - DNA, 1832 bp, Homo sapiens
ttattatttcattggtactttatgttatccaagtactctttatttgcaaatttgtaaatttaatcacattaaatattaatttttaaatactaaacattcaattttcatcattttttagtaaagtagaccttattaagacatttaaacaggtcctacattataaacataatttttgctgtgaatggaatagagccactgaaatgtacagtgaccctttagccagtaagctcatgcaagttttagctctaagaaaaaaaaaacactactctgagacatttaccaatatatttgaccatgtaactttttgtttcctgggtcatcttaatgaaagaatgctccaacttgagaaattctgctctgtgccaaaagttggctttttttctttccttttaaaaggacttattaattgttctttatgtttgcaatatgtttatagcttaggaattattttatggagtatcagaaaaggttatagatttacaaacaaaccttaagcttgtggagcaaaaaataaggcatttgttatgttctgtacttcttgtgattcttgactatatgagtgcaaatggcttattgagttattgttgagaaatataaaaagctaactgataacttctccgttaaaattttacaaaaacttaaacacttctttcaggctgcagaagatgtcaatgttactttcgaagatcaacaaaagataaacaaatttgcacggaatacaagtagaatcacagagctgaaggaagaaatagaagtaaaaaaggtattgaaaataattattagaagaataaaatttttttatactatagctactaaaactgaactcagttaacaagtgaatatatatttctctgggctgtttgttgcagatgaatgacgcgatccactctagttaagcagaaagtcattttttttttaagggatatgcgataacttacagagttgttgaggagcttgagtctagaccgaggttccaggaacaagtctcggagaacttggctggcggtggaacagctgttgcctccactgatcccagagtcagctgtcttcccaatgaggaagccacccttgcagacttaggaacaccaagctgctgctgccagtgccacctaccccagtaaatctggggcctgtgtccagccgtcccccttgagttgaaatccagctcaaatgcatttgattggtggaattgaagttattatcacttatgcatgctggcagaactttcattacccgcatgatttacttacaccctatcagcaagcaaggctgagaaatgtaggctggtttttttggttttgtttttgtaggaaggcagaattcacaaagtcaaaaattgttaaaatagaagaaattttgagtgaccatgtgcctgctgtccaccacagggcgcttattgtccagaggacaaagctttaggtagctctaagtgcttgcttgtgaaatgtcttctaaaaagttacaaattaaggtcttattctaatgtggtaataatacctttgtgagagggtccctcagagagttgctgtccccaaattacaattggcctttagcttctatcagagaactttgagtacattttctttgccattttgcatttatagaaacaactccaaaacctagaagatgcttgtgatgacatcatgcttgcagatgatgattgcttaatgataccttatcaaattggtgatgtcttcattagccattctcaagaagaaacgcaagaaatgttagaagaagcaaaggtatgttaaaggttaattctgaaattagaatttatatcactataaagaacatgtaattatagatgtagggaaatagtagatgctagc

SEQ ID NO: 315 - DNA, 1134 bp, Homo sapiens
gaaaatatctgagttttcactgggcaaagctgctctttcttacaaatgaggcactttttaccactcttttccaaagtttagctccagaggcctcaaagttagtgaaaatttctgccagatttggatcataagttgttcttcttaattattggtggttggtggtgtgagtttctatcatttcctgtagtctcatagttatttttgttgttggaaaaagctgggttagaagccagcaggcccaggataaactatttatagaagtctttgtatttggttctttgttaggaaataatttagacagtaattttttactattttttagatcagcagaaactgagaaaacaaacttgatttattctgtgataagcagatatggaccatgaattaaaaatgcccacattcagacatttagatctaattatcagtgttacttagctgcctgtccaagtttagaaggttcttgacctaaaattcttcccaaatattatttcagacacagatgctcagaaatcatcctattgaatagaattaatttaaaatattttttttccagaaaaatttgcaagaagaaattgacgccttagaatccagagtggaatcaattcagcgagtgttagcagatttgaaagttcagttgtatgcaaaattcgggagcaacataaaccttgaagctgatgaaagttaaacattttataatactttttttatttgtttaataaacttgaatattgtttaaaatgataattttccttcttcaaatgacatggaaagcaaaactttcttttttaaaaattttcatttatttaatggaaacttgcccattttcacatgtctgcttatttattttatatttttaaaagaagacagtattcacctatgtattttgcataacgattatatcaagtctaggggcttcatgtcatgttattaaaatcagttaagcaatcttttatgtttctatattatttagaatatttgttgttgcaattttcacataagaaaatttaacagttgtgtcatgttgtttctgtctgattttaattgctgtctaatgacggggaaagcacgatgaaaagatgtacaatcctgcatccttgcttatttcacaactaaagctttgtcatagacttcaaa

SEQ ID NO: 316 - DNA, 564 bp, Homo sapiens
acattttttacatatctatcaatatcagagatttgggtaaaagaatgggtaatgtttaaacatgtggaggcatgtggagctttatacaaacagggcagaaccacagaagaacgttttagaaaccaagagatgtgcagaaagaaatgtttagtgttttttcgttttaaattttagattttattttagtgctttgtaattaattggggtttatattgataaagatgtggaagttaaacagctatgtatgtaaaagtaaggcttatttcttaaataaaggatgcatttcttcccactcccccacaaaagacaaacattttgggatttgggagacctaaatgtattaactttccagcagatggcactgatgtgccaaatgtgaatggaaggatcctaacacaacaatgagattgttaggattaaatatacataattttagaggaaatatttttaatttttaaggctaaactgcatatgtattttttggttcagtgtttataaacatgaattcaggcttaaagatagatgattatataatttctaaaattcttaatactataaaggcag

SEQ ID NO: 317 - DNA, 1155 bp, Homo sapiens
aggtctggggatcccccagtggaagatctagcataggagggcgactaaagtttagccctttagaaatgttaacaacgaacactcgcctgacatgggccaagagactgaactatgtaattcactgggacttcaaattttgtcctgcatattatcaagaaaacctaatacaaaaacccaaatatctaacatcagtgggatggaagcgtgtgatgttgctaacttcattttcttaacttacctgtgacattttagaacattacaaatatttgattcccattttaagttcatttctaaagcctttgcttatttttgtgaatagtaacttccctgggctagctgaagactggggaacagcacgcggtgcatctgaagggaaaggaagaaatgtcagcttcagccagtagttgcgacagagggaagttttgatctggatttgtcactaacttcttttttttttttaagcaggaatcttgatttgcatgtgcaatcactctttttagactgggccactatttgttttttaaagcagtgcaggctacacaacagataattgcacaacagatctggccctgagactgccaggttgcaaagtcaggtgcataatatgatacgtcatgtgcaggcttttcacaggaagtggtagtagaagtcttctgagcagctatgctttgctgctgactgtaatgtttcattatctctcacatccattaatttctttccatctccacaactactgtgatccttgtccaagccttgtgagctctagtcaaaagcatggctaagtaagggagcaaggggatggaaaagccatttgaggtagggtttcgacagggggtctctaaagggttttgaatagaaaggagcagtactttttaataatttggcagttgttaggtgggctttactgtagaaagatggaggtagaaatactggatgttattgtaccttttctggtgagccgaatcagttggctgaagaaaagatacaccaggacttagagaaggggtgaaatgaacaaattttgtcaatgattggagaaacgaaggtgaagctagaaggagaaacccaaagagaagttggttttgagcacaggccagtacagcttgcaacaggttttctttggcttctatagtttaacaaagaaaaaaaaaaccc

SEQ ID NO: 318 - DNA, 666 bp, Homo sapiens
gatggagctctatttgatgactaagaaggcccttatttccttcaaaagagttaacccacccctactccttacacacaaactggagctccaaacaccctagaccccctgacccgaggcccccacacctgagccccatacccttgaaccccacacacacctgagccccacacacacctgagccccacacacacctgagccccacacacacctgagccccccacacacctaagcctcacacaaagctgagttcccataaccctgagccccgaaacctaagtttccccacccctaagacccccacatttgagccccacacacccgagtcctacatataactgagtccccatacacctgaggcccccagactggagcccccatatactcaagccctcccacacacgaactccccacagagctgagtctccatgtacctgatctccccacacctgagctcccatatacctgaaccctacacacacctgagacccccatacctcagcccctcccacatctgagcccacacacacctgagttccacacacacctgaggaatcagctccctcccgtcaggcaccagtgattctcgggggtgataattgtgtggtttgaaaaagcctgaacacattaggtgctgaggatcaaaaatacatgaacaattctctagtt

SEQ ID NO: 319 - DNA, 893 bp, Homo sapiens
ctcagcgaaagagctggtggggttcaaatcattccatctttctgggattggagggcgtgggggtggtgttgggggaagagactggagcaccaactgagaattcttaatgcagattatagtgctggagagggtaacaaaagagggcagcatcaaagagattgacccatccagtttagggatcgagggtagctagaagcattccggttgctggtagtaaacagattataaaagattaagcagtaggtggtgtgagacttggaggcagcaagtgaaaagtatttttacaagaaagttaacagtggtgggaaagaggcagagcatcacttaatgtcactgtggtgcagatggaaaggctttttttttttttttggactagggaacacatgaatacacacagtagatgagaaggagccaggaaagaagatgatggaaaagtcaacggacaagaggtaatagttggagcacatctgtgaaagaaaggggtgctgtagtgcttatacaaacggtagactgggaaaacacagaattaggtgtatatgttacaaaaactcctaaggaataaatggtagagaaaaaaatttagaatagtgatgaactgtaggaggaagatatagttggggtaggcaaaaacaggaggaggcttcaataatctttatgttctatttcttaagttgggtcatgggtccatagttattggtagtcaatatgtttattattaattattttatgtacatgaaattcttcacaataacaagtttttttataaagttctgttgtggcacaaacaaactaggaaaaatgtgcattactgtggcattgttattgatatttctgtattgcattcaactacttttttgtcatttgacataaaatggatcatggtgactctccag

SEQ ID NO: 320 - DNA, 553 bp, Homo sapiens
gtggttaatgaatgcacaagttgtacttttgaaatttattttgttagatgattttatttgtgttctgttacttatccaaaggaatttcagatcggttctcatatagacatataaaagtatatgtgtgtatatataaaaatgtaaatatagcattaatagattaggaaaaaagaaagggagaataagttggtcacagagtccacctttcagattgatgtactctgaacctctatgtagctaagacagagaaggaaaaatgatgagtaataccacattggaaagggtgttatatatgaatatctcaggagacaaaacatctttcagaggtctaaaccttaaaaaaaattttccctcattaggcattgactttgagcaatgtatcagatgctaactttaacaaagacttcaaagcaaaggcaagagcaaaattcatatggccaattcttgtagcaattaaacagttaacctaaatccaagggaaataatttagaaagaggccgataatacgcagccaacatccacagatgtaccctgagctaggcattagatatct

SEQ ID NO: 321 - DNA, 1016 bp, Homo sapiens
cctcaatgcagatgagattgtcacgtgctgggtgaggatggtgggtttcttctggggagtggaagaggctgtggttgaaaaagacaactgaagatgaattctttgttgatgagattatatttgtcttgttcttttttaaaaaatagccatacataaatgatttagccaaaggcatgaaatgtcatttgggttcaagtgattgtgaagcgtttttgatttaacaaaaaatcataaaatgatccagaaaaaataggagactgcaattcatagaaatgctattttgtgcgattttatctgatttggaatggggttgaggagaagtaattgatgaaatgttatgaaatgctagaatttaaataggcctgatgtaaataatgaagcatgctttcaggctttcaaaatacacaattctagtctcagtttaaaaagtggtcagttggagccaatctaaacatatatagagactgatagcagcaaccatggcatagaatacatgtttccttcaaagttttaaattacctgtttgcctagagtctgaaccctgctagaaggcctttgaaaaagcattgaagggggagaaaaatccctcaaacaacttacatagtatttgtccatgggatttgaatggctcttagctagtaactggtgtttgcaatcttttatggaggtctttaaaagcaaacaaacacataagaacaggggactgaagtagtatactgaacacattctgaatgttatggaggacacaacaggatacttacacatcttcattttgtgcacttaaccatgactgcgtgctgcacaagacaatgggtaagtgtaacatatgagttaattttggcattatggctgctattaatgcaaaaccaggacaacacaaagacaatatcacacctttccattctgtcaagaatggtgggtgcaagtgctctcaggacccagtaatagaagagcagatgaatgtaaaaccaacaggaaagccatcatcagtgcaaagaaaatgggtgcagagataa

SEQ ID NO: 322 - DNA, 938 bp, Homo sapiens
aagaagaacatgacaatgaggaaaaaatgacaaacatcagcaaaccccagttcccagactgccaattcataacccagttcacagaccaccaactcacaggggaatctgagcctttgtagaaaccagtgagggttgaacaaagccctttaataaatagtaaaaaggaaaatctcatctttcctttggaattttaaccaaacaacactatttaacaatgtgttctctatcttcaacctataggaagaaaccctttccttaacctacacaaaaagtaaataaatctacggcaaggatttttttttttttttttttttacaacatcaatgaatggtttaaatgtgatttttttagtttatgtctttcccagttgctatcatgggttaaaagagattgcagaatattgcacaaaaggaaagaaatatgaagttgcttcaaaagatgaaaaaacagtaatgggcagatttaaaaaaaaattgtcaagaaaatatccaaacaaacttaaatgtcaccagagagtttgccaataagtccataaagcaaaaagattattaacctcaagacagagctactgttgggatcacaggaaaaccatcagctgtgcaccatttttattgacacttcagggtaaactaataaaactccccatttcaattaaattttggaaactcatgttccctttttcttaaatgctgtaaaccagcttataaccacacagccccttttttctaaaatctcctcttggctgaggacgtggagccaatggcacattctagcatttttcttactatggctttcctggacacaggcggctataagacgtgatgttaatgaaagggggaattgtaactatatggttttcatttttgcaggtgagcttgttgagccattttgaaatcaagtgctcctttagggtgtgcttagtgttccttttcaggggt

SEQ ID NO: 323 - DNA, 566 bp, Homo sapiens
ctactatccgagaaagtgggaactgatgtcaggggctcactgcaaaatgttgaagccttaacatatctacatgtttgatgtctagttctttatagagagtaaatatatgagtcttccatcattttgattcttgcttttgtcttgtgtactcttttgatcattatttttcatagtctgctttcttatataactcaacatttacaataaggtatcctagcaagcactttttaaaaacatatataactgcaaaaaaagaatggaccacttttctgggactgtgcctattgaagaaatgtgggctttattattatctcttagttttttgtgtaaccttttaaagtgctttatagctctctctcctcctatatttatctttcatttgaaacaagtgaaaaacgggatcaattcttggcatcagaaggaaatgaatacctagcaaaactgcatcactttggaaaccagtgcaatgaataactacccttaagctttcaacaacacaatttatagttgaattctttatacggctgacatgtcttggacgtcacacaagggattcagttacatct

SEQ ID NO: 324 - DNA, 2355 bp, Homo sapiens
tggctcttaattttacaaggtctgctttacagctttgtacgtataaagcatattgacacattgaaaggaaacaattgggaaatagtgaattaagaaaggctgtgtggctaaagaaaagatcacgtttaatttgatagaaaatggacttatagagatgaaaaatgctgtagaaatggaccgagacaaggcaacccaaccatttttcacttttacatgtgagtatggttttgattctattcaaactctggcttttctagaaaaaaaaaaaagagtaactggctagaaagttattcatttccctttatgcttgggaatgaaataaaatgtgttcctctttttgaagttgtgcgtgctttcctttccgtcgaggttacttatgaggcacatggaaataagggaatcaatttcttcctcttcttgtgctacaaacctttataaaggttgctataaatgtcataactgccttgtttcctgaaaagtaatttccctgtcattccgatctgttcctttgagataccatattattggtctatgatgatttctttaaagtgcgtcaaagtatgtggtttagtgtatttttcttatttcactgccttacagtgaatttctcactcacttcaaggcttgctcctaagtcaccaattattcataaaggattgcttgattttatcctcctaatgaaatgaattaaggttgaagaaaagcccttaacagagcataaaatgccaaaaagaccttaggaaattataagtccttccagctaaaatgtgaatttaactacaagaagaggaagaagcaggagaaagaacatgcttagaaatggtggcatgatgagtcctatagaggtggacagaggggaaaggaagagtcatagttcagcatttatggcttccgtattgtcaatatccatcagatgcattaaaaacaatcctagaaacgaacagaaaggccaggaatgcaacagcaatcacagtgatggtcctaaagcatctaaacctcctctgaccgcacagtgtctctgataccatgaagagtagaaggacagatgagcatgagggtaaatatacatatggaaaatgtttgtttttacttgtacaccaagaaatcactggctcaagctcacaaaatgcaatcatattttattacattttccagttattcaagactcaactataccagaaaacatcttaaaaaacacttttaaacaggatgtgaatgctttgtattacacagcttaatgtaattgatttagagtccatgaggaaaaccaattttccttttttttttgtgagacatattgatttaagggaaaaagcagtaattgattgtatctttggagatcaaaggtgagttgatgagagaggaaactggaaaggagagagaaaaagacatagatagaaagagataaaatgaggtctgaatataaacatctatttctgagatttaacttattatcactaagttttcattttccccaaatatttctcttcaaggaacagaaatcattcggattcagatctgtgtgcatgcaaagaatctgtatgtgtgctctttggctgagcccatttgtaaaataaacaagaaacatagagctgttaagaaataagatgagccaggacttacaggcacagatgtaccctcatcttttggatatttatactgagttttcttaagcactcaaaactttggaaggattttaagatgcttcatagagtcatttgtctaattggatatctaggagagcaatatctaggaagaatgcactcatttcagaaaacgaaaagttatttgtaattataatagcgggcttttctgcctctttttggaactggtagtgagcatgctggctcagttcctcaccctatgcctccttttcttgcttttaaatcttctccattatctcctttattatctgctatttattttactgaaggtaatcactgctttattaatcactgcttgagtaaccacagtgggacttgaaatgagcttgtttggattgtaaaagtcacaaatgctggtggacctcttgaaatttccctttttcccttcacttttatgagaacttccacgtgtagaaatgtcatgggcgaccagaggtggtttagtgtttctgaagcttggagaaagggaatttgaagatacttttcaggtagcatacacgtggtgtgtcacggtaaaccataagaaattctcattgcttacatgaaagagacttggtttgcttcaagagcaaaacaataaaaatggtttttgaaacaaaagtaatttaggcatccagtttgtttttcggaaataaaaactcaaatgtgaattcattttgaagctggtaattacattttgtttctaatgtag

SEQ ID NO: 325 - DNA, 590 bp, Homo sapiens
atgagtcactccaatgaagaactttaactggaaatttggtgtcctacggagaggccgtagcatgcaaagatgccagctgtcctcattgatacttctacctacccttccatctgtgctcctgcctccattcccaccctcagataaggaaactcaggacctctagacatgtcaagaacatacttgagttgagagacagctctccatatagacagctctccatatagacaccaaagtttgtagccagatttttttttttcatttttttaatctttcatctccatggtgttcaatgaacccggaacataaacagacagatggtctgagtgggcgggcattttcacttaatgctaacacagttgccatcaatcccacctcttaaactaataccacctccctcttaaattaatgacgtcacaggtatgcagctccctgcagaccttggcaatcacatgggaatctttttggcacttctgagagataagatctatggaaaaaagtctcagaatctgcaaatcttttccagagaaaccttatcctgttaagaactcttggactgatagtctcttgataactgacagtgaaataacact

SEQ ID NO: 326 - DNA, 801 bp, Homo sapiens
gaatgggcaaatgcacaaagtatggacgaaatgagtgctctgaaggttgtgctctttggaacctctgccactggcatcatttcccaagtgaaaaaaaaaatggctgccaacaacgcagacaaaaagctaagtgaaaatgaatacaggatctgtctctaataaaaacagaaaaagaattatgcttagaaatattcatcactggtgcacgatgatccagatttcaacagatcaaccttgatatgctgataagagactatttgtggaaagactgaaccttggaggccacactgcagggctccaccggagatatgacaattgccaacatctgtatgggaattaagggatggagacatgaggttaattgccagggctttaagaggcaggagaggaggaggtggaagaattataagaatcatggtgctgttagtgggaacagccaaggctctggagttggcaaagaagattaagctgcgggtgacaggcaggtggagggaaacccagcacatcccactggctcaaggtgacctttctttcttttcttttccttttatgattaaaggacaatcatgcttgtggttacaactgtcaacagaaaaggagggtagaaattaaaaagtctccaaacttccttggttcccctgagagagttcataagattgactttgattccagacatttttctggatacatacagtgatctatcataaatatctaactagcaggcaaatttttgtgtttccctcacctcagggagtcctcttacttccaagtctttccaaagtttctcatattccagaaaac

SEQ ID NO: 327 - DNA, 1505 bp, Homo sapiens
gtgctcaccgccttctcactcacacagatgaaatctattaagtttataaatgtaaactttcaataacagtgtgactatgggacagtgatatttaagggatattttaaagggtggtgtagacatgattcacatgttatttcacaatgacatgtcattgttttccttcttcttttcagcttcttctctttcatatttcagtatgaaatagaaaatccaacaaccctgtttccattgaaaattgccaaataaatcatcagatctttctttttagaggcgttgccttcactatctggatgtaataattataacaactgggaacctgattcgggctgttggcttctcccgacatgttcagtcataatggggaaactaagaacattttctatttccttccagcatacagcagtattaagaatcctaggaaactgacaacttcccacttctatagcatctgaaatacaacccaaaagaaactgagctcagatgtggcctcagggttggacatttgaaatggcaatgcatgggtcttggctcacagctctcagaatcccagctttgtatgtgtttcccttggacaatgtatgtgcttagtagatgaggaggaaaccgcatgcttctctccagctcggcggagaaaaatatttcttctctttttccttctaatgatttcattagtcatattgtttacattttactgaaaaaaattatatcccccctttaaaatacttgagcattgggcagttcatgtaaataataaatctgcctaagtttacaaattcttgactagaaataataaacctgggcgataatagtaaccatagaattgaacagcttttcccagaggggcactcagtggggaaatttggtaattatagttagcaaatggccctttggcaacagaatgtcttttttaaaagctcaacaaaaataattctggggaaaataaaaaggcataatctgtgaaatgctgaatgtaaactataccgcatgacctaattaagaggactgctatggaggatttttccaaaatactcaataaaatgagccttattatggcagtttgggggaaagtaagcctatttgtttcggaggtgcaaatgccagataatataatattaaaagaagatagattcaaaagcaaaagagattactgtgaagagcagataaatgaagtgtaagcacatttagtgttaaagacaatttttttttcactgctacaatatctggtactgcagacacatggaaatttaaaggtttttcccccacagtggaaacgttatgcttagattgcatgttgctcatctaatatccttgatatgagctttaataatattgaaagacttgctattcagctgcctaacagttctaaagtggatatctggcctagccaccagattgaagaatgtgaaagagcttattcagccacgttaatgaacaaagtcaatgactactccgttacttcctgtcagttcactcatccctccatccctcctcctgtctacgtt

SEQ ID NO: 328 - DNA, 434 bp, Homo sapiens
tgccctgtggacagctgcatttcccagggctctctgtttccacacgggagcatcatcatggcctttctccccaagcagtgggtcactggggaggagagctggagtcacagagtacagtgtgagggagggaaggggaggggaggcggcctcccaagggacggttcctactctgagccaagccctcagagctgagctgaagtctggaagtttggagtcttccatttctgtttgggctctgccccccaaaccagctggcgactccaccccctcctgggtccctcccaatccctattccacatcccctgctgtgtggctccctaatgcctgcacctacgtgtcccctcctggaggcaacactatatatattgggtgcaggggcgggtgggggtgggaagggacagagaagtcagagacagccagtgcccagtgcccca

SEQ ID NO: 329 - DNA, 946 bp, Homo sapiens
acagtgccccatttctgaccttcacagacatcccccatccaagaacaagaagctgaaaatgccctcagaaggtcagagaagcagagggctcttctccccatccccaacccaaaggtggacaaaaccttagaaggtgagagggacacagagacccctttcctaagcaaaggaaagaaatctgtcaagtcagcagctgaagcccagagccccttcgcaagggaaagactttggggtgatggtgggtgggatgcagaggggtcccctggacattggcgggacgtagtgctgactgtgatggcagccacgggtttcttgggccttttcggtgcatcctccccgcaagcctccaccacgctgttccaggtaggctgaggttaggcccactcagggcggcaccttggcgcaggacacctcttccgtttgggctttccgtcctcgtgatttcgctctccatctgacagtcatccatggtgacagggtgtgtccctttcccctaaacaggatcctcaatgcccatcggaaaacgttgtaaggcgttgagcccccaacgccccctcaccacaagaccctgctgtgaccatcttttcctggtgaggagagtctgcacgggggagcagggcgccataccccagaaagaaacctctgtgcctgggagtgagggactcgctgagtaaagtgaggtcgaagagggtggagaggggtagggtcccagtcaccactgtcctgaacccacagttcagtccgggcccaagatggccccacaggagcacagggggtttcgggcgctgcaggtggaggtgaaggaccagctgcggtgcggaaaggcctgacccgggcggcagatcgcctgcggagagaatgaccggctggggtggaggcggggctggggtggtgtgggcgtggctggggaggcgtggctggtgtggtaggcttaagcagtgagggc

SEQ ID NO: 330 - DNA, 708 bp, Homo sapiens
cggaattgcgggctgcggggcagagatggtgatggcgtccggggggcggggctgggtggacggccggactacaagggacgagaggctgggcttaaggtagcagggggcagagcggattgcccaggggcggggcgggatcggggacaaggctcaagtgctgaggaccagacatgcgccggaagcccaagcccggctagcgagtaggagggtggatggtgggggatgataggctaggcttaagatggctgagggcggggatacaaggtggtagggccagagatgggctggatggggcgtgatcggcctcctcctgggagatctcagcccacctgagtaggcttcttccggccgcaagagagactggggcctggccctgatggaatggccattctgagcgtgaagacctgcgtccccctcccttcaggaagctccctgtctctcaaatttcagggggatcatcacttcccatctctctgccaggttgatcgagttctggatctacaggagccagttctgagagggaggactgggggtaggaacggggtctttgaatggctgcgggactgcaggagacttccagcaacctcagctccatgttggaggaacattctgtacctgctgggtgctctgtgtggtgagggtcagggatgagggtgagggccatccctgatgtaccaggcctactaggttaggcccaatggtaccaag

SEQ ID NO: 331 - DNA, 456 bp, Homo sapiens
taataaaatacaattttactgcagaccacttctgaagttggtggctccctaaatgcaaagcatcctgtgatgctttttctccactgtgcagatggaaaccatcctggactagaatttctttcagggagagatggagcccttctgtctttactttgagctgctcagggggttctgaggtgaggagctgaaagtggtcaggccctgatgggactctgtggccttgacatataaggagaccaaggagacagatcctccttacacctgggagccaaatgccttgacactgctctgtgtcctgtaagccagcctctccatctttcgggtgctggccaacaacacttggctctccagatattttattcatcagggatccccagccctgcccgcccatggctagggaaggcaggatggggcttgaggacaagcctaggggagctggtgaaaatacagaatagt

SEQ ID NO: 332 - DNA, 781 bp, Homo sapiens
tacagaaaagctccaacacatgctcccgtgcatcagcaggggctcaggaagaggtgggttgctgggaggatcacctgacagaagagagttctctgggtttgggctggaggctggcagtggcctccttgcccagacagggctgatgggtagggggattggcagtggaggggtgggggcagtgagggctgacaccttgaagctggatgctgagtttgacacacttagagctgaacactgatgtctgttcagccagagtctggggaggtcttggactccaaagctgatttgggaatttgggaagaaacattaaagctttttagagaataaggaaagagtatgggagctttactctgttcagaaaggagaatttatggaagtatagctcacaatctatgatctgcacccccaaacatccaacctcccatatgagagataaaacacagcatccctaggaagcattattcctgcgcctccaccaggcagtcatgccccagcccagcctgtcttcatccctaaccattaccattccacctccttttgttcagggcaggtctgggaatatgttcatgtgagggatcacttcttgcaaatgctccagttatcctgcacccttcaagtaggctccaaatcctacaacattctccttgccctcccaactcgcagggtgccagcttcttcccattctggccagagtttgtgacttccatgaacgcccataatctacttttctctgttttctctgaccccatgctgagggggaaatcaacaataataaaaagga

SEQ ID NO: 333 - DNA, 382 bp, Homo sapiens
gggaaaatgagtaaggaaataatgccctgtcccaatgactgtgtctgtctgcagtgcactctatgggtcagagagacagcaatggtcccacggggcaggtgcctggggcttcctctcctaaatcaattctctctcctgatccctgtctcctaacaaccctacatagtcacaagcttggtctctaaatcagaggtgatcattgtccatcactaccttaattgaccaccagagggaggtagagagcaaagtttaccgcctgcctgagcagcactcaccgcatgaccaggtcctgcttccttattgtctcttttaattgacctgaagcgtccttacaaggcagtctaacttaaatatccgccagtacaatttaaattctgcccca

SEQ ID NO: 334 - DNA, 729 bp, Homo sapiens
gaggcagggcaccctggatgggaggaaggagcaccaccaagacaagcctaaatgtggatattttcattccaaaagcacaagaacttcaacctggctgaccccacaagcccatatatctcctccctgccttgaactcaccaagccccctgcttggaataccagtaggcagtctgagggaatgggacaatgtggtgcaggcagggtcgggacgacaccaggagtgtgaggacaggcccggcagagtgctctgagatcagactgaaggcgggagaaatgagagaagcaagacttcccggtcagaggagagaaagctgactagatgggctttgcaggtccttggggagagcagagccacgtgtggcttttagatgccactgttctccagatctttgcagaatccactaaactaggaaccttggcctgcagccagtgggagaagggtagtcactgggaagaaactcccaaaagtctgaccgaggcaatgctaggctggtgagagggtgggagtgggactatcttccctggagctgattaaggcataaggagactgcacagcctcaggactatatgctgaaatgcaggcatcacgtcagtgtagtggctgagagatacaaggaggaagaggtggaaatccaggaaaacagacagagatgaaaggactataacacacacagcaggtttctatgtaaatatgtgcttgtgatagggaccagatgactaacgacaacc

SEQ ID NO: 335 - DNA, 1575 bp, Homo sapiens
tggaatttactcttcacagcattcagggttgcgtttctttttccatgagtggtactaagaagagcctcaaggtgggagcaggaaggctctgctgtgtcaggttatacctgcacatatgcatggccacatggcccaacactgtaagggccttgcttgtaagtcccttattctgtcctctagcaatgtgaccatgtaggcaacatttgaaattcctttaaaattccttctaggcagagatttaagctaagaggaggacctgagtgacctctggtgcaacatctgaaagcccacgacaagcctcctgggcttttccatgaatatcgccgtgcccctgcctacggatatgctgatgtgtgtatacaatattctgtgagaagcagagacgctgaacactaaacaacacaaacccatttggtctaactccatctctgcctactcagacatctgcttctagcggtatcagagttatgtctatgtagctaaaacaaatggagtaaggcagcaatacacacaggctgacaagcccaggatggagggcggcactgcagatgctctgctctctactggaatgtgtggacatacaggaatccctatcccaggacacccgcagacccccaccatgaatccgagatgctccccaatgacggtgatgatgacagaacagagatgccatccctggtcacacacacacacacacacacacacacactcccactgcctccctctgcacccctcccaaaggcacctgccttcctctcctctcaatccacaagccaacctccagctgccacctctctatcagccttggctacccccacccacgctggcacctgcctggcagctccctatccaccccctcagccctcaggaggccagggcacacgtggaacaggttgatgttgttctccaggaagtggagtgggaggggggtggggtcactagggcaggcggggtccccggaagcctctgtccctgcataaagcagcctgtcctggcaagggatggtcatcctctcaacctacagacccagtgagccctaggccctcaccccagacccagctgctggataggacccagccccgctcccaggtaagaacttgatgacagcagggaaggcaggggtgctctgaggacacaggaagatgggtggaccaagaagggaatggaactcccctagagtccagtgggataagtatcccgataggccttggggagggaagggagaggcaggcctgtggacatctctctggtgaagaggaggctgctgttgcccaagcccttcccaggtgcacccaggtagcaccaggaggttgtcctgccccatcctggccctcccaggaatgagggtgaaaaaaaaaaagcaccttgaagctggcagaacagccccacgcatctgtgccgtgcttcctgccccccctgctgctgtgaagtgcctgtggtggatgtgggatgcttccaagccagctggtgtggcctcttccacccacggggataactggggtgtgccgatcggccacccagccagagcacctggactcaaacttcaaagacagagacttaagatgttgaccctca

SEQ ID NO: 336 - DNA, 560 bp, Homo sapiens
gagacaatccaggcatctctaagagctcctcctgcctcagagccgggtaaactctctctgcaggggcccagcctatatcccgggctccttggcagccttggcagccaccttgacactctcctgtctccccacctccacagagacaatgaccatgtttgaaaatgtcacccgggccctggccagacagctaaaccctcgaggggacctgacaccacttgacagcctcatcgacttcaagcgcttccatcccttctgcctggtgctgaggaagaggaagagcacgctcttctggggggcccggtacgtccgcaccgactacacgctgctggatgtgcttgagcccggcagctcaccttcaggtcagcctcaagcggggctgggaactgagggatactgagggacaggggctgggcacctggcctgcaaggaggacctcaaagctccctctggccagaggtgattagatgtcatctagcccaaagtcatcatcaggagctgaggaggctggtggtcggggggatacctctcagctcagcctcttttatttatttacttgtttg

SEQ ID NO: 337 - DNA, 468 bp, Homo sapiens
agcccagccccttttgtcttttccctcctgcagacccaacagacactgggaattttggctttaagaatatgctggacacccgagtggagggagatgtggatgtaccaaagacggtgaaggtgaagggaacggcagggctctcgcagaacagcactctggaggtccagacactcagtgtggctcccaaggccctggagaccgtgcaggagaggtgagagtgggcgggactgagggtctcccgggatgtgggtggggcagtgcatggaaatggtgcttggggccttgagctgaaaggtaggacccttgcactgacctttgccaatgtggtcatgacaggggagctcttggaggcaacccttctggcccatggctgcatccaggccatttcctagtcacacctcccgctgctgccaccgtctccaggaccacctccccactgtcacgcatgcacagggaagatgatgtcca

SEQ ID NO: 338 - DNA, 481 bp, Homo sapiens
caatacactagaaaaaggagggatgtgtcttaactgcccccagctgagacctgagcactgtgttctgctcccataaatgaagcctcctgcctgaccccaatacacactaagcacgccctcgggaatgctgccccacagcacaaagggtgtggcaggtgccacattgatgctgggcaccaccggatgtttggcttgacacgggaactgacttttaagtagttaagtagtggttgaaagaaggaggtaaggactgtgaaggccagaaggaaaggctggggtagtcatccagcaagcatgtatatagtaaagcactctactacgggctggggtgcgcctagaacatctttgtccaagaaccttgcagtctaggaaggtgaaaattttaaaaacctgtgcaacagtaattataatcaaagccaagaagtgctaagtgctgtagggatggtttgactgagtcttgtggcaggtcaaagggacttct

SEQ ID NO: 339 - DNA, 352 bp, Homo sapiens
tttttttgatatatttgccaatgaaatgaaggaaaaaatagggtagtaatttgagggagtggcatgatcaaagcaaacaaatttgttaggattagggagtttatatatggaagcagacagaaggagcaagtggagaggaggaactggtgttaacagcaagagagagcataagatgtggagagaaaggatcccagagagatgaatggggaggaaagagggggggagcatctacccccgggatcccagagagatgaatggggaggaaagagggggggagcatctacccccgaactggaggaaaagggggtaagaagcacccaagaggccctgttcctggccaggtgctggccca

SEQ ID NO: 340 - DNA, 777 bp, Homo sapiens
cacaggcttggaaaagccaatggaaataaggaatggtctccatacctctatctattgcatctaaatattcaagggatgatttgggatttggagccaggagtaggggttagtcatggaaggcgtcctgaaagaggtaagcatgggacagatggtgaagaggaagaaggagccagggcttggatggaagctctagggtgatgtacaggcaggagatggagcaggtctgcccagttcccttcatgcatctgaaccaggaactagaactgacctgactagactctactgacctgaaccaggtcactagagggaaaatcagcagaaatgagcacaaggactttgaagtccttcctcagagtccagaccagggacaccactgaaggcttccagcttcttatctccctgaaggctctcagccctgaccctgcacctcccccaactcacgctcccaatatctcatacttaagatgtccagagattcacaaattctcattgtctaattctagggatccataaatcacaaggaggctgtaaccatccccaagggctgcgtcctggcctttcgagtgagacagctgatggtcaaaggcaaagatgagtggggtgagcagagacccgcatgttctccccacaagatgagaattacctgcaccagtactgaggcaccctggtcccctcttgcggaaatgtcagagaatgagtaggggggtgtattgtactgtgatccgactgcagccatggagcctgctctggagagaagggtgaagaggctcctggatt

SEQ ID NO: 341 - DNA, 942 bp, Homo sapiens
agagactggaatggatgatagaaagtagtgttctcatagtagagaatttatcaaggaagaaaagattgcttccagcaatggaggttgaagctgggaattaaatgaagcatttggggtgcaaggtcctagcccttagcagagccctttggcttgagactgaagaagggaatgtggggcagctgctaagtgtcctcccaccctccctcccttgcccttcacagatattccacatatctgcaatgataacatgcaaaccttccctcctggaggtaagtgaaattgcttacgggcttcccacatcttccgccctacccctgacattatctgccaaaatcctccaccctctcctagcttatactataatcccccaaggagcctctgcttttgtttcccaagtccctaagaatacctagcctcaactttagaaagacagatagaggcatataaatactgtcccagagagatatagaaactgacagacagagaccggaaggcacagtcagaagcagaagtaagacttggagactgagtgtgttcccgaatcatgggggtggatgagctagcataatctccctgtgtttttataatgatcactgatgaaactgccttgaagactgttttagatgaaaaggcaaaaatgggttttgtgctgacagatgtgcattttttctgtcttcagaaaagtcaggagaggagaaggtcatccgtaagtgtttcctttcattccactgaaactttcttgactccaaattttaaaactccagtctttttctttccttctgacaggactgacagggaaatagcagagcgaatctcagcaaataattgtccccgaaacatggcagaaattccaatagcttgggaaaaagcagtggaaaggggggagtctttgcccaggtggtctgacgcctgagacctttgtcctcaacagccttactagca

SEQ ID NO: 342 - DNA, 1525 bp, Homo sapiens
tagaaaaaaaaaaaaaaaattaagagtcttagtagctataacctgctacacacacatctgcaactcggccgcccagcaactggggccagagccactgagtcacagtaatgccaggaacaaggtagctgggctctcccaggagacaggcaggatgtatttcctcatcttccttagtgtctcaacccctgggtatggctgccattctgaaggattgcattcttatcttttttttttcctttttttctcagttatccaggcatctgatgttggtaaggaactttgtgagtttctcccaagactttggcatggaggtagcattaggggcagagagaggagaaggcgaagtcattctttgtcagctaactcatgggaagggaaaacagactttctttctccactttttgctggagtctcaaagaaaagtcaagtgtgtactgatatgggataaggcctgggatctcaggaagattaactgttgggttagatgatacatgcatcctggcccaccttctcgccccaaccctcaggttagggttggtggatagttctgtcaccgcattccttggtaaagaaaaatggggccaggctcaaactggggggtagagcatgggtacctaaagggggctgagtgtaggagccctgcagggggaatgctgactggagaggaaggtgcccgatggagggctgtgtgtcccattattgtccccataggggacgtacacgaaggcttcaggacactaaaagaagaagttcagagagagacccaacaagtggagaagctgagccgagtagggcaaagctccctgctcagctccctcagcaaacttctagggaagaaaaaggagctacaagaccttgagctcgcagtgaggacctagtggaagtggggaagggtgggagaaggcatgttttggtgaagatttggtgggggcgggtattgcagcaggtagggagatctgacgggggcaggaggtgggtggccaggggagtccaccttagataccttccccaaggctggccacgtgccccaaggctgccaggccactgctcctccctttgtcccctggaaaagggcaaacagtgggttcccccaaggcacatgctccctctgatggccagaagggacttctgctggaggggctggaaccttctctttccagagtccaaaactcaggaaacaaggaacccaggagtccagtactcttcaggacatgaggcctcgaaaaagaaatcaggaaatggagagagtttccgcatgtcaaggggttattatgtgctgggccctgggttgggccctttcctatgttatcttcaatagtcgcccaccttcccccacagcttgaaggggctctagacaagggacatgaagtgaccctggaggcactcccaaaagatgtcctgctatcaaaggaggccgtgggcgccatcctctatttcgttggagccctaacaggtaagtggggaataaggtcttcatttatagaccttttcagtaataggaatgaatcacttgaatcaattccca

SEQ ID NO: 343 - DNA, 475 bp, Homo sapiens
ttaacacctgcgttgtaattacatccaatgaatgaaggctgaaattctggaagtgcgctatttggaggctgtagtcccctctgcaccagcaacacacatctttctctgctttttttctccagagctaagtgaagcccaacagaagctgctggtgaaatccatggagaaaaagatcctacccgtgcagctaaagctggtgagggaaaaacagcagatgctggggagagtctgggagtagctgcagccagtggagatgcagatttcgcctaaggatggagccattctggaggatccctgtcttatcccaggggcttatgcccactcctcctttctctctctatttctcattttttgttatttcacaagaggtagaagactgaatttctgggcaataatctgggtttattagcctgatcttgggagaagagacagaaactgtggctttgcttattcctagccaaatattgtaagcaaa

SEQ ID NO: 344 - DNA, 578 bp, Homo sapiens
taaagtaaggaattctaataaggggaatgtaaccttcttgtgatttttgtgagttaggagaggagagaggtttccagttctttcttttcatgctgttttgattccctccaggtggagagcacgatggaacagaacttcctgctggataaagagggtgttttccccctgcaacctgagctgctctcctcccttggggacgaggagctgaccctcacggaggctctagtcgggctgagtggcctggaagtgcagagatcgggcccccaatatatgtgggacccagacaccctccctcgcctctgtgctctttatgcaggcctctctctccttcagcagcttaccaaggcctcctaatttgccttttacgtctgcttcatgactccctaatgccttcccaacctcgtggtgctgtgtccttaccacctaagggcatttcagagccatcagctgaagacatctgaaatctcagctggtcacccatgataaccaacttccacctgcccaaccatatatcaccccctacccctccagctccgcaacccactaagcccatctgctgatgcttaaattttctttac

SEQ ID NO: 345 - DNA, 808 bp, Homo sapiens
tgtgcttaaatattctaggagtagaagcactcagacttttaaaactatgagccgtttcagcaaaactgagaaaaaaagaagattaattaatttcctatcctaatccctcctacttatacttccccaaaaaacaagctttactggaattaatggaaaatattatgtcaatcttaggaatgatatgtcttttggtgtttttctttaaagaatttatcatacagaaattcttaatttgtgccagaaaaagaaattgttatcatactgcatataaatcatatgtacatgaatatgatgctgtactgtcctcaggcaaactggaaaatgctcagagggtatagaatgtggaatccagatttttttttctgttcaattagttttctttaatggaatctagagtctcaagtgagaagatatcaaagcagtttgtcttcaaagaagagcatttgggagtcccctagctctgggttgagggaaagaccgagagatatatagtagaagcccgaaacaaaaataagacagatttcaaatttattgaacagaaaatgcagatgggcctttaaaaaaaagggggacccaagaataagactaacccaaaactttaaaaactaaattgtgatattatttcacctttctctgttctgccctgaaatttagggttcttgtaggaggaagtagtgtgggtaggcttggcatattactactaatatggatattacaatctcatcaaaccgctgggtttatatcatcctcctctgcctaaaagctgggtttgaacatctttcaccaacctcttttaaagcagtatcag

SEQ ID NO: 346 - DNA, 1964 bp, Homo sapiens
gttttatgagtggaagaatttctctaaggattttggtccgtggagtcagactctcccccagtgtcttagtcaccccctgcccagcctggttccctcatccaccaagaattcatgaccaactgccagaagctttgtgttatgccgccagcctccctgatcctgagcaccttccaaagcctcactctattgctcatggatatactgggttgttatctgctgacttggttgttttctccttgtgatgtaaacttaatagagagatgagctaacaccctaactatctagaagagtaactcctttgattgttaaggatgaacataactcatctgttttcttccttaccattctcgcccaccttcagttgcagatatggtgttatgaagaggttctaatgagtttattccaatgatgattcaaaagtcctgttatccaccccccagccctggagggtgagaggacagttgaggaggaactggtcaaggcatgttccctaaaactagagcacatatctttccagttagcgagtggctgtttaacgcaaggaacatcctgcaatcctatgaaagaggatgcaaaagatatgcaggataccctttatatatgcaaaggaggaggtcaaaacatatttcctgccttctaggtccttacaacagggctagattgtcttgtagggtccgtgaaaggtctaaaactcaggacttccacttatgggagagagaaaagtttcaaggtagggagagagtttttgttgtgtgttctaagaaattgggagctatatccttcaccttgtttcaccttccctgcagaaccagtggggcagtcctttgaaaaataagtgggtagggtttcttgtccaatttgcttccccttaggtacaccactaagtaaaccatcattctctccttaggcacaccattattctgttccccatttcacaatgtctgtctggatgtataaaagccctctcaatgggctccctaaagcgtctgccagtaggggctcccaccctctttcctcaacactcccaatccaccgcagcccagagcacagtgtctgcttatctaaccatctgactcccccgtatactacattcttgagctgtttttcacccccctatttgctaaccgtgggccgtacatagggtggacccctatattttgttaaactggagtgattctacgcaaatgcacgctcctacctatcggcactcccagcctgcagaaattgtatgccttatgttcagcactaaactcaaatctaaccaaggaagtccggatcccatagggttcttcctactctccagttcggtttattttaaggccaacagccctagcttcacgtccctccttcacagccttctttccttccctcctgccggatgcgcccggcagccgttgagcacaagcccagcggatctggaaggagaccccgccgcgaccggggaaaattgagcgaacttgggcgcaaaacccgcccggcaactcgtgacgtcatctcgtcccgcgctcggataggctgtacccactccacgctggttgaggcgctcttaaagtcctttgtaacccagattggagcctgaggggacctctcgtggacgcccacagaaatgcactcgagaggaacataaaagcatcacacttaagcgctcgaaagaaagccccacgaacccataaaggctcctccccgctccttcctcgaagctcctccttcatcctgcacctcggctgtggatttatttcccctttgttgactcggccatcggcctgccgggcctggcgtttcccagaaggcccagcgccgggaaggggtttgcagctgctccgtcatcgtgcggcccgacgctatctcgcgctcgtgtgcaggcccggctcggctcctggtccccggtgcgagggttaacgcgaggccccggcctcggtccccggactaggccgtgaccccgggtgccatgaagcaggagggct

SEQ ID NO: 347 - DNA, 1583 bp, Homo sapiens
acaaggcgaaaccgccgcccggcggaggagaacaagaacccccaccgccgccggccccccaggatgtggagatgaaagaggaggcagcgacgggtggcgggtcgacgggggaggcagacggcaagacggcggcggcagcggctgagcactcccagcgagagctggacacagtcaccttggagggtacggcagcccaggccgggaacgtgccgcgatcgcgggtgacagcgacccctgtgatttggcttcttgctgggaagccacagcagcctccaccaccctcagttctttgggatcacccccagatacctgctcccactgccccgacactcccgactccaggcccaatgactgaaccttctctccaggctgggaaccactcccctcccatcccctccatccccatatctggggttgcatctatatctaggtcccagtgggcctggggactccctcttttaagtcctcccctctgacctattccgtttatatcccacccgactgattttagcgcctccaatatatgactgattgttcccgctggaaaccagtgtttgtgtctgtgtgtaaacagggccaggatgacctagaatattgactcctgagttttaaaactgtacagcagatttttgttgtcctagctgcctttagcacactcccccgaatgaaccatttcgacctagtatcttgtttcctacttctctaactgaagtgtcccaacagtccccttgctgtctcctcccttcaggtccttactgcccctctgtttctaaagggtttaagtacatacacacttaaaacttttcgggtgtcatctttgtttggttttgtaatactcaacctttggcctaaactcctatataccggtgtctcctatttcttttctccgaggttcctgtttcgagtgtctgtagtcctcttgttcctccaagttcatgttttacttttcccacttacagcgtcctgtttccatttgaagtgggcaaagtgagagcttcccactgtgatcctggtgccattttcctggttctggatcaagtgggaccagactacttactaggttttcttttcactaaaatgcgtgagaaactagctcaaaaacattgagataagcaaagttatcctcctaggtggtgcttttgaggatgtgatggtgttgactacatcagctcttactgtaaagttgagcaacaggatcgatatttaatagagatccttttacctaaagtagtggcagcaatgtcaaaggtgccactcagcattgcctactgggtgtgtttattacaggcacttcattttcttcttgtaaagtaattcatattcattgcagaaattgtggaatgtatgagaagttaaaagcaggggataaaaaacatggttaacattttttcttgtgaatttttgagctgttctcctataattgagagcaagttatgtatacagtttgtatcaaggcataactaaatataaattttgaattttatgtgttttcattaacattcgtaaacataatcagcattcaatttattccagaaacatttattgaatacccaatataatggttaagagtacaagttctggaa

SEQ ID NO: 348 - DNA, 644 bp, Homo sapiens
ctccttgcctggagtggtgggggactaggagtgaaagtgacatcattttcttctctgctcttcttcagacatcaaggagcacgtgaaacagctagagaaagcggtttcaggcaaggagccgagattcgtgctgcgggccctgcggatgctgccttccacatcacgccgcctcaaccactatgttctgtataaggctgtgcagggcttcttcacttcaaataatgccactcgagactttttgctccccttcctggaagaggtgagtgagtcaggccaacttaaagggtgcaggcctggcctcagatccccaggaacagcattgttttccatcctaaagtcccatcttattacctgtggtagcatgaggagagaagccaaagcagtccatttgaatactcatctgcacagtgacaagggaaccgtccactgccctgtagtgtcattcttcaaagtcaggggatcaggaccctcccagccaaactcatttcccactaccctgcaacctgtaccccctactccagttgaggttgcgttgggtgacctctctgttgttctaggagagagaaggtgctgctgcctctttcttctgaagcttcaccatggaggaggtagagaacagtggttaggaggagcacagctgtcag

SEQ ID NO: 349 - DNA, 669 bp, Homo sapiens
agacgaagtcagtttggtggtggtggtggcgcctccgtgccaggagagacctctccttatcctctgtagctgtaaactctccctcatgattcatggcatgggccaggtctcagccttctccaattccactgaccttccagcacctgcatttccttaaaatcctgtatactcagtcagctccgtggatggggaaactcagaacatccctggaggcagggcagtgaagagtttcttgtctgggaaaggggaaaagcgtactgttcccccaactccaccttgaatattttctgaccttcacatcgctaaactcacgaaacgtgattattttgggggtgactgtaacacattattttttccagtgtcagtgacaacataggaaaatatgttttgtttatatgttgactttccctaaattttctttgttcccacaagaaaccattttttggtctcattattctgatttcatctctagaattatttcgttcagccctgtccagtagtatttgcagtggatccaggtgtggtggtttaatgtctccacttaggttgtagcctctttgaaggttccttacatcgtcctttgtctccattatgttgtgtaaagaaattttttgttctcctgtaacactttattgtgtttattaatattatattgccagcctccttgac

SEQ ID NO: 350 - DNA, 453 bp, Homo sapiens
atacatagtggatgctcaataaattcttggttacttgatcagactgagcttttccatggtaacttctgtcctctcctagcccatggacacagaggctgatttacagttccgtccccgcacgggaaaagctgcgtcgacacccctcctgcctgaagtggaagcctatctccaactcctcgtggtcatcttcatgatgaacagcaagcgctacaaagaggtatccaggatgcagtgagagcgattcataagccccaagtgatgcaaggggtttggcggggagatggtccctggtgaagaaatggaaataatcattgattcttaagaactgtcccccacactctttccccatagaggtatgcgtttgatcccacatcccaggagaacccactcttgctctgggcactgtgggacagggcttgcagtggtcatgctgtaccggtctgtgggggatac

SEQ ID NO: 351 - DNA, 450 bp, Homo sapiens
cttgattctcttttggcttcctccccaggcacagaagatctctgatgatctgatgcagaagatcagtactcagaaccgccgggccctagaccttgtagccgcaaagtgttactattatcacgcccgggtctatgagttcctggacaagctggatgtggtgcgcaggtacaggcagccaagcatctcacttggggtccgtggggtcagagacttggtcagtcacaagcacacagctgtggatctgcagagggcgaagaacctgtagatgtaagcagggaagaggggcagtggttcccatgccctgcgccacgtgaggggtgtgggagagagactggtgctagatgaagaagtgggtcactgctgggctgtaaagaactgtccccaggttcttcccttcaccccacatcaaggtaggactgagggtgggttaggggtggagggacaggctag

SEQ ID NO: 352 - DNA, 622 bp, Homo sapiens
acagtattcagcaaataaccagaaaagcaatttgtataacttttttaaggaattgagaaagagcgaagagttaaaggcagttcagagagttgtgatttgaaggctttgacatctttctttccttcttgaagcttcttgcatgctcggctccggacagctacgcttcggcatgacgcagacgggcaggccaccctgttgaacctcctgctgcggaattacctacactacagcttgtacgaccaggctgagaagctggtgtccaagtctgtgttcccagagcaggccaacaacaatgagtgggccaggtacctctactacacaggtgagcagaggggcccaacccataaatcagaaggtgtctcaggcctgcctggtgcaaattttccaaggggtggtgcataagaggcccatttggcaccctggcttgtcggtggggagttggatgaccctactctgttgaccaactctcctctcctccactcccagggcgaatcaaagccatccagctggagtactcagaggcccggagaacgatgaccaacgcccttcgcaaggcccctcagcacacagctgtcggcttcaaacagacggtgagccacaactaccatcatccctttgcctc

SEQ ID NO: 353 - DNA, 373 bp, Homo sapiens
caaaaggttgcttcacatctatttgtgggtgtcaatgaagcagacactacctgcacctctggcagtggatattcagagtgtttctggcagataggtttagaatattcctgattccccagcgctcctgacagtcattccaggcttggacctagattgtgttgatacaaaccccaggtttttatctagtccttcatgttcacatttggaaactgtattgtctgtggccaaggaacccagaaaatctctgcaaggctgagtggctcaagtaaacataaaacttggccacttaagagctgtcagtcagcaagtatttaagcatcaaccttggtattaggcactgtaagggataggaagggaggataataagtgatct

SEQ ID NO: 354 - DNA, 381 bp, Homo sapiens
cattaaaattgaactggtctttgaaagatgggtaggattttcacaaggagtaaaggcttttcagacacacagggtgcgtgagcaaaatgttagattgcttacaatatgagagacactaaagtttcttttgaaaatcactaaaaatactagtaattaacatatataaaatgtgtcatgtaccatgagagaggctttcaggcatttaaatctcagtggcaggaaggcgtagagagctggaagagaggtctcgggctgttggtgagggagcgcagggagagagagggcgggagtgaaggcatgtttgggagaaggcctgcaaccagccctctgccctctgccctcacacacctttgccgtacccctgtcaccacccagcttaca

SEQ ID NO: 355 - DNA, 493 bp, Homo sapiens
ggcacagagcgctctgaggagggcggtgctggctcatcctgttcaaagcggaggtcagctagcattcattcctgcagccaccttgtctcttgtaaacttgaatgtctctctccgcccattttcaccctccctgtctttacttaacaccagcttcactacctgtgttttccatcacactccttcctctctcttctagccttggcccatcacctgtttgcttcagtctccgggaagaaaacccccagccctgctgcttcctctctcaggcggccgttcctgtctcccctggctccctccccaacagtgcactggccagccccttccctccagtgttctctctgctccttctcaccacctgggcctcagcagagcactctgagagcttctctgtcgatagtaaaaccctcattctctccttgagtgaccttgtttgctttcccagcttcagcgctcgcctgcatgatgctcttcagcctgtacattactaactccg

SEQ ID NO: 356 - DNA, 463 bp, Homo sapiens
ctaactctgacccctctcacgagcatcaggcctgcagatccagctccccctcccactccccatgtctctctctacagcgtgtcccaaagagatccctcctggcccccttaccattccttcctcctgctttcccgatccagatcagggccttgggatcatctctgactctcccccatcctccttcccatcacttggtcgtctgttgaattgtctgcacatcttctgtgtttgcctgttccttcatattgccagtgccatggtttgagccactaacattcccagacacttctgcctggtcatcttcctctccagcagcccagcttacattcacttgccttactaagcagagctccagctctgtccttcccttgcctgggaagcttccattgctccccactgctgtagggtatcataacggtcttgtgaggtagacaggctaggtattgttattgttatttggtag

SEQ ID NO: 357 - DNA, 1891 bp, Homo sapiens
tggcacacaaaatggcaatggcatagtccccagactgcggtcccaactgtctctttcctaacagctccccaggcacccacacttttctgcctctttttcaatctgtacccttgaccctcctcctttttctgctttgtcagactccttaaggcacttcataaattaaccatttccagggatttcccctcacacatgagttattccagtggacagggcagcctcatgggtgcctgtggagggtgaagggtctgcctggccgtaggtgtgatcacacactcccgttgtaacccctgtctcctgtgacacttgctgccccacgatttagctgctttgtgttccgtgcctcctgtttgctggtgaactcctgagttggggggcgtcattccctccactgtagttcttccgcgatgctgactccacccacggtcagcaccactcggaaatacttcacagtcctgtagaggaagacaggtccaggtttccagttacccttctatgtctggatactctgctcattcactgaagccaggccccttcctgcacttatgcctctacccagataatgagttctacccactgatgacctcctctcctctagtaacagtccgcctccctaatgagcatctctggctgacacacgttccgttctccaggcctgtgagccctggtccctcgctgttgctgagccacagcacccgcccttctggcctcactttagagcactgtcatttcagagcagactacgcgcggggtggccaggtgaaatgcagctgacggctctgcgaccaaatgtgaccaaagggccacattcccagcacccggctccaaaggcagagcttggattctatgcccagcacaggttttcagggcttcctcctctctctgggcctaaacagtgatccctttccctgtttcccactacatctggcagaatttaggccacatttcattttcttcttccgcccatggggctccctgcccactgtgttcccctgtcactctgtccaggtgcacaagcttctcatcgtggtggagctgttgctgggggagatccctgaccggctgcagttccgccagccctccctcaagcgctcactcatgccctatttccttctgactcaaggtaaggctggcttccccaccccagagcccactaggcccccttcagtggggcctcttacatgcctgtgcctatttgcatcatccaatctactcctgttctgcctgcagctgtcaggacaggaaacctagccaagttcaaccaggtcctggatcagtttggggagaagtttcaagcagatgggacctacaccctaattatccggctgcggcacaacgtgattaagacaggtgtggatcaggatctgaggggctgttggaggagcagaagccaggccagggcaaacctagtgggtatccttgggcaagtgaagggtctgtgtccactctgcccaccccatcgctccttcctctcccaggtgtacgcatgatcagcctctcctattcccgaatctccttggctgacatcgcccagaagctgcagttggatagccccgaagatgcagagttcattgttgccaaggtggggctggttcaggaaccacagtgaccaggttgtcactttcctgccaatctcaggaggcaggagtgggaggagtttggccaaggaggggaataggtaaagcaatggcatagtcatttcagggcgtgcccgtcatttgcagtgaagccaagaagttgccagagagagcatggatgtgcatgtgagtgtgtgagtgtaggtgtgtgcacatgttgagtttatgatagtgcctgtgagtgtgagaatataaggagggcagaggaatgggatggaacaagatgttctctgacttagaagatgggcgtgctg

SEQ ID NO: 358 - DNA, 479 bp, Homo sapiens
gctgggtgtgctggtgaactttcctctttgggggcctgcaggccatccgggatggtgtcattgaggccagcatcaaccacgagaagggctatgtccaatccaaggagatgattgacatctattccacccgagagccccagctagccttccaccagcgcatctccttctgcctagatatccacaacatgtctgtcaaggtgagaagcccgtggctgcagagtcacgcctggcagcagcacacccctccctccacactcatggattcctcagagaagactggcttaatttgtggcccacgtcccagccaatctctgtaaaatcactgagctgcagcacagggggcccagaatggggaggggacttggccatagttccatagccagttgccctctcctattgcgtttaagggatgatgtggtcaccagggaggaccaggcagggattcagagggcggggttctacatttggttccaaatttg

SEQ ID NO: 359 - DNA, 1478 bp, Homo sapiens
ctaaattgtaaaaaagatggcgctggtatctagctccacaaaagggtgagcccttatcctcagttaagcactgagtttggcgctgttactatttgcttgccatgtttttttctggtctcctccgaggaaactaggatattgctgccttgcttaaaatctggctaagccctactccacgtgacatgcaaggccctttgtgacctggtcccttaggtcaagcctcccctcccactcctgccccaccacccagcagccagcccactgggtgcaggccaggcccctcccacatggaatcctccaccgggaaggcctctccccgttgccacatccactgtgttcctccttttcctcctccctgcccagtcaagagagttggtcgtttattcctcttttttcagcatttcccacagggcactgtaataattcctttgatgcctagccccccactagactaactggagaggggcccgccgcttcctgcctggtgtctagctcacagaggggacgcagggagtgcaggttgcgtgagtgcctcacctgcttccttccctcgctcatctcctctctttgctgtgccccaggccatgaggtttcctcccaaatcgtacaacaaggacttggagtctgcagaggtaagctctctgctttctgggtgagaccgaaaggtcaaacttccacacagaaggggagtcgggcgagtgtctggaagggctgagctgctctgaagctttggcctcacttgcctctctccccaggaacggcgtgagcgagaacagcaggacttggagtttgccaaggagatggcagaagatgatgatgacagcttcccttgagctggggggctggggaggggtagggggaatggggacaggctctttcccccttgggggtcccctgcccagggcactgtccccattttcccacacacagctcatatgctgcattcgtgcagggggtgggggtgctgggagccagccaccctgacctcccccagggctcctccccagccggtgacttactgtacagcaggcaggagggtgggcaggcaacctccccgggcagggtcctggccagcagtgtgggagcaggaggggaaggatagttctgtgtactcctttagggagtgggggactagaactgggatgtcttggcttgtatgttttttgaagcttcgattatgatttttaaacaataaaaagttctccacagtgctttgtgcatcagttactatacttcactgcagtattggcaggctcagattttgggttttttggccttagagtactagccccaggtgtgtaatctgagggcgatgggtctgcagatggggaggtgcccaggggaggatgaagggaccctgacctggggtcgggggcctaggtttactctcttttcgtacttgtgtggctttggtaaggtcttgttaggaaaggtgtaccatgtgtccatcaccagctgcagaccttcatctcccaata

SEQ ID NO: 360 - DNA, 500 bp, Homo sapiens
tattcataatttccattaaatacaggttttggcctggccttgctctggctcctgatcatactccagccctggtcacaatatttggcatcactaccttcctttaatcttcagctgcctttcggtaaaatgaaactcctaaagttgactttgcaaaacaacacttctcctgtgtttcccaaacccgcccttcaatctctgtggcagatgttttgatcctagcgtccggattcttcatctatttttagggctccaatccttgccccattttaacctttgattttgcaaaccaatcccaaaaccttctcatagatctttgattcccttccaggaagggtgtggtgggaggactacggttaagcacctcctccgtgtccttttaggatgtgaggacaggttcaggtgggttaaatgagtcctgcagttgaacccaggctgacctgataccaagttcaatgcgccttctctcaggctgtgctgccttcttccggcctcagcttgga

SEQ ID NO: 361 - DNA, 439 bp, Homo sapiens
tctggggttctgttatccagtcagtcttcatttgtctttgggtctccatgtagcagtccttctggcccttgacagctttccatgacttcaaaagccaacttttcttgagtgtgtgatccgaagacatacatatggcaggcacagctgcctgaagccctttccagcctgttcaatgtttgtagctgtaatgagcattcttcctgaggagcccagcctcacaagaggttataaatcttcagccttggttgtaagtgaccggagagagtttatcaccctcttccagagagctgaggtcattcgccatgattccctggttcttgcccacataaggtctatgggccatttttccgtctgctcactgtctagaggcttcttcatccactgtctggatgaaccttgttggcgtggcttctaatttcctgaagaaactcagtgtcac

SEQ ID NO: 362 - DNA, 1728 bp, Homo sapiens
gagaagatggggcagtttcccctctctcaccccagcccgtgtccacttcaaggtgaatgaccagggaagtcacgtgtcccaatcccgcagttccaaagcccttggggaccctactgtcagggtcgtgcacgaggaggtgaaggtcaggtgagccaatcgcctcgaagggtcttgcctcattcgggacagacatccggtttcctctggctctaccgggattctaggggctttagccgaatgagtcatggggggcgggggggtttctgggggagttcccagctaatcaacttgggacaggacagcctggaactttcgatggtgcctatccaagtgtggggtgggcacagcagccaagacccaatgtccttatctcaggtaggggctcaggaggtctcccagacaggcagcctccggagagtttgggggtaggaatgggagcaaccagcttctttttttctctcttagaatttgggggcttgggggacaggcttgagaatcccaaaggagaggggcaaaggacactgcccccgcaagtctgccagagcagagagggagaccccgactcagctgccacttccccacaggctgctgccgcttccaggcgtctatcagcggctcagcctttgttcagctgttctgttcaaacactctggggccattcaggcctgggtggggcagcgggaggaagggagtttgaggggggcaaggcgacgtcaaaggaggatcagagattccacaatttcacaaaactttcgcaaacagctttttgttccaacccccctgcattgtcttggacaccaaatttgcataaatcctgggaagttattactaagccttagtcgtggccccaggtaatttcctcccaggcctccatggggttatgtataaaggcccccctagagctgggccccaaaacagcccggagcctgcagcccagccccacccagacccatggctggacctgccacccagagccccatgaagctgatgggtgagtgtcttggcccaggatgggagagccgcctgccctggcatgggagggaggctggtgtgacagaggggctggggatccccgttctgggaatggggattaaaggcacccagtgtccccgagagggcctcaggtggtagggaacagcatgtctcctgagcccgctctgtccccagccctgcagctgctgctgtggcacagtgcactctggacagtgcaggaagccacccccctgggccctgccagctccctgccccagagcttcctgctcaagtgcttagagcaagtgaggaagatccagggcgatggcgcagcgctccaggagaagctggtgagtgaggtgggtgagagggctgtggagggaagcccggtggggagagctaagggggatggaactgcagggccaacatcctctggaagggacgtgggagaatattaggagcagtggagctggggaaggctgggaagggacttggggaggaggaccttggtggggacagtgctcgggagggctggctgggatgggagtggaggcattacattcaggagaaagggcaagggcccctgtgagatcagagagtgggggtgcagggcagagaggaactgaacagcctggcaggacatggagggaggggaaagaccagagagtcggggaggacccgggaaggagcggcgacccggccatggcgagtctcactcagcatccttccatccccagtgtgccacctacaagctgt

SEQ ID NO: 363 - DNA, 1734 bp, Homo sapiens
cagtgtgccacctacaagctgtgccaccccgaggagctggtgctgctcggacactctctgggcatcccctgggctcccctgagcagctgccccagccaggccctgcagctggtgagtgtcaggaaaggataaggctaatgaggagggggaaggagaggaggaacacccatgggctcccccatgtctccaggttccaagctgggggcctgacgtatctcaggcagcaccccctaactcttccgctctgtctcacaggcaggctgcttgagccaactccatagcggccttttcctctaccaggggctcctgcaggccctggaagggatctcccccgagttgggtcccaccttggacacactgcagctggacgtcgccgactttgccaccaccatctggcagcaggtgagccttgttgggcagggtggccaaggtcgtgctggcattctgggcaccacagccaggcctgtgtatgggccctgtccatgctgtcacccccagcatttcctcatttgtaataacgcccactcagaagggcccaaccactgatcacagctttcccccacagatggaagaactgggaatggcccctgccctgcagcccacccagggtgccatgccggccttcgcctctgctttccagcgccgggcaggaggggtcctggttgcctcccatctgcagagcttcctggaggtgtcgtaccgcgttctacgccaccttgcccagccctgagccaagccctccccatcccatgtatttatctctatttaatatttatgtctatttaagcctcatatttaaagacagggaagagcagaacggagccccaggcctctgtgtccttccctgcatttctgagtttcattctcctgcctgtagcagtgagaaaaagctcctgtcctcccatcccctggactgggaggtagataggtaaataccaagtatttattactatgactgctccccagccctggctctgcaatgggcactgggatgagccgctgtgagcccctggtcctgagggtccccacctgggacccttgagagtatcaggtctcccacgtgggagacaagaaatccctgtttaatatttaaacagcagtgttccccatctgggtccttgcacccctcactctggcctcagccgactgcacagcggcccctgcatccccttggctgtgaggcccctggacaagcagaggtggccagagctgggaggcatggccctggggtcccacgaatttgctggggaatctcgtttttcttcttaagacttttgggacatggtttgactcccgaacatcaccgacgcgtctcctgtttttctgggtggcctcgggacacctgccctgcccccacgagggtcaggactgtgactctttttagggccaggcaggtgcctggacatttgccttgctggacggggactggggatgtgggagggagcagacaggaggaatcatgtcaggcctgtgtgtgaaaggaagctccactgtcaccctccacctcttcaccccccactcaccagtgtcccctccactgtcacattgtaactgaacttcaggataataaagtgtttgcctccagtcacgtccttcctccttcttgagtccagctggtgcctggccaggggctggggaggtggctgaagggtgggagaggccagagggaggtcggggaggaggtctggggaggaggtccagggaggaggaggaaagttctcaagttcgtctgac

SEQ ID NO: 364 - DNA, 971 bp, Homo sapiens
gagcatctgcaccaggcttgtcatttaccatcttccataaacttgagcccatccatcaagttgcccacaaagtggaagccaagttcaaggtgaccactggggtcagagcttctctcctcagactcggtctctgcactcgccccagctggtcacttcctgcttgtggcagccttgggctgaagagcgctaagctcacagcccaggagggtggggagctgtggcaagcagggggggcagcgaccgcaccacaggtgtgaggcctgcctgcagccaaagactcctgtgtggctttggggtacccccaccagtccccagtccactatctgcccaaaccttctcctcctcagctcctcagtccctcccacctcccctgcccgtggctcctcggaaagcagggtcagaagttcccactgccagctcggagtcatccatctaggggctcagagatgtgtgaggcaggcaaggaagggttaaagaaaggtccggcccctcatccccccgcctcccatcccccagtccttttttggaggcaacagatcaaatcccaggctagtcagagtgtgggtggtgttggaccaggttcgggagacagcagagcaggccaccctgccccagcactgtggggccctgagccaaagcctctcccctttcagggtacagctggctttgggggagggggcagcaggccagccaacttggctccaaggaagggaagctgctttcccctggcccttccccagctgagcaagcccacataggaccctgagccctgccgcctctgctcctcttcctcctcctcctcaccacaggagtgagccgttccctggccacagcacaggagtccagggagaggacactatgccctgccccgggtggcaccaataccaacagcacacacagtcacaaagggagccacgaggagctttatttatacatgaacgaaggtagatttccctcacatattacaaaat

SEQ ID NO: 365 - DNA, 1294 bp, Homo sapiens
tttgcatctagaaagttcctcagaggtaagactactcctgggctggggcgggcgcacacaggggtgaccactgggcttgtggtccaggctgctcactctcctcaggtgccagcagatggagaggaaattttgaaagaagaaaccgggagacatcctggaggtcaggagtcaggagcggggaactggaagccgctagaggctcttgcaccatgtggagcggatgtgaggcacgatgcctcatctttcctcactgcttcccttggaggcgcctggggctgcgccagtccccagcccccactgcggccatgccaagcccctcagagtgcagcaatggctttagcagccacctggcggcccaggggcaggctgaggtccgtgatggccagaaccaccttggggctggacatggctgacaccttcaccagttccgacacctgccacggacagacagatgctgcttgcgggacggctggtggtgggtgtgctgtcccagggggaaggaggcccctccctgctctaagggctgccccgaggccccagcaccagcaggagagccgggaaggtggtactcacggtggtgaagggcatgaactgcaggacgctgccacggccaccctgctccaggcagtccacacactcctccatgaaccactgcacgaactgggtgtgggggccagcggtgcgagaccccaggatggaggagatgagcaggaacaggttggctgtagagagtggggggagagtgacaggagggagttccatgagagtgggtgaggtcacactctgggagaaggtgggactgaaaagggaaaagaaacacatgctgagcatgtccccaaaatggggtgtcagagagagaaaatataaaaggcaattggggaggggaggagggggaactagacaggagcctgggggccaggacagccaacaatgaggggcatggagagggaagggaggggcaccgcaaggccccttccagctgacaaggtctcccagcctccatgagaagagagactcgtccagcttagccccaggttcggcagcaggggtggggaactcacccaggactcggttcagagggtcccgcatgttgaccgtgtggagctgagaggctgagagggagctgctcatggatcggtctgctgtgggacggagcagatggagcgctgggaaacagcctgccgagtgcaaaagtggtgctccccggggatgccccaacccgaccttcacccatcggaggtaactggtacatggagagcccagagaagaccctgagatcaagagcacaaaggga

SEQ ID NO: 366 - DNA, 1331 bp, Homo sapiens
ctttcttctgatcaagtgtatagttggtcccctagttcctaaaaggcttcagagaaaagttcaggctcaggagaaatctctggaaacaggaaaaatgccacagaaggaacccttggcagtaagcctggcagggaggaggggacagtgaaaaggatgacctccagggaagtggttggtggggggtgtgctctttaggcaggaaggtggggagtagccccatgccccagcccgggcctctccgggcatgttttgggggaaggaaggaaggaaggtcagagctggtgagtcaatggcacaggctgtgcctgaggcagtgaactcactcacttgggtagcttgtcatcccctcaaccctggggtaagggaggggcaggagggctgtgggggaacaactgtgggctgggctggacctgggcagaggagcttcaaccctcagggagtgagaacagcaacctcttctccaggggcaggacacagagcacccccttgggggctagaacagcaggtccctgccacaccctctctgaccagctgcaaagatgcctgcagctggggcagcggcagagtggcagcatcggggagtgaattcccaggaaaaggagcggcgcgcggccagcccacacactcactggggctcgaaaggatgttggcatcgtcctcattagagctcagcagtcgcatcaacttcgaaggctgcacatcgtccagggggaagaggctgatataatcctagagggagtgaaagtcactgttatacacccctaaaccccccagtttccagctgtcagggaaaagagcttgagctccgatttgagcgaggtcagcatggctagcagggcctcagcccctctctgctcaacccctcccacaatctgacaggccccttgtgcccatgggcaagctggggccacacaaatcacccatgcagattcctgaccaatcatgcccaggcacagctgccccaagggcaggggccacaactgcttccctttgcctggggaatccttaggaaatgctgtaacaaaccggtgaacaagtgaagccggcgagggcagctggggggcctacctcaatgtcttcgcggtgtctcttcttctggcgggtggacgcctgtcccttgtgggaggagtaggaactgagggcacaccacacggccagcctggcaaagggttccagaaaaagggggacagtgagaggtgccccaggagctttctgtgtctgactgggctccccaaagcccagtctcccagggtggcaccaggcgaggggtgcttgaccctgggtggccggagcagggcaagctctgaagagaatcttacttggcaagagca

SEQ ID NO: 367 - DNA, 1277 bp, Homo sapiens
gctctgaagagaatcttacttggcaagagcagtgcccggggggtccatgaggctgtgccacttggaggagtcagtgagcaggccaggtaggatgtggcccagcaggaccagggtcacttgctgcatgtccaggcagaagatggagtagagcagctccactgcccgcagcgtgtgctccttccgcgtctccttcagcagctcctagtgcgcaggaaagggggcagttcaggagccaggggcccgggatctggggctcctacaccctgccaccccagcatggctgtccagtaaggcccgcagagggggccccagatgttgctccgcccctcaggctgaatcccagtctctggccagagctccccaaggaggcaactctgaggcgaggcattccggggaggccacctggctcacggcagcctctcagggaagcctggcagaccaggccaggtgtggggagccaggggacaggacccatgtcggcccacagccactccagcccaagtaccttaatcaggttgttgcagaaccagtagacgccgcccatgtgcagcagggtgtcaaagatgtggatggagcggctgtccacccagcccttctccagcaccttggcaaaaatgtccgtcagcacctctttgatgggccgcttggggggcagcaggttccagtagggcattgtgtccaccccggtggagggaaacttgatctgcgtggctgtctgctgcagcacgtcggcacacatgcgctccaggatcgagttcatgatcaccaccctgggggagggccgagagaacctgaggctcaggtgccactgtagggtggggagggagaggagggaacacccatgccagactttcccttggacttaggttacggaaatctccctgaggcattaacccagttttgcgctgggggacggtataccccggggtgacctggcccctgctctgctcctggcaggtctctcacctgcaggacacaaagcctataaatagggactggggagggactttcctccccctggccattccagccagatattcacattttcttttattctccaacttcccccatcccccaggcctgggccctgccaacctgccacataaataaacacaatcacttccccctaggctgagtgcttgggggtccccgcccagccctggcctcctcccaaagtaaactgttccttccaggagaggcccaagggctgccccacaggactcttcccggcccctggtagctgggcagatagaagtgtatatccaggaattttctca

SEQ ID NO: 368 - DNA, 1203 bp, Homo sapiens
gcaaacaacttattggttgggtgaatgaactcaacgtaactggtcaccagggaagtcctccaagcccctgaagagccagggcaggaaactgtcctaagaggtaactgagggtggggcatggcctgtaaaatctacagacaggttcctagctcctagacagtcacacagctttgttcttttgggagctagttgtctagaacttgagtctctgcgggcagaccctgtttagggtctgcatttctgacaacacagcaggtgctggcatataaacgcttctgccacagagacacagtacatgtttgctgagtcagatgagtgaatgcatgaataggaaagtgagtgagtgatcaagtagcgtgtttgcgaaggtcagaaaagagaggggtgcttgttattggatgtgctgacttctcacaacacacttgaagggtctgagaagggaaggcaggttaccgacctctcattgtagaactgcagggtgttctcactaaacagtggccctgccagctggcggatcatctgcagcgacttctcacgctcatccagccccagcatccggacgtgggccacaagccaagccacagcacacaccgccagactgcataccttccctttgatgttatcagtgattttctaggggagacggaaaggtgatgggctaccatctatctccctttcttgagccaacatcaccttctcagcctctgcgggcagctaagtgcagcgggtggagtcccgggccacattccacacctctctccacaagtttgatcttcccagagctacctgggccagagggagtagctaagacaacgattacacaaaatatcaatatcaaaacatgagctcctggattaaaggtcttcttgcccttacgaaatataacaagtcatcactggctggctctgtgtctcaggggagcaaacgctgctgggaaggcggggctacctggatggactcgaaggccaggaccccattctcccaggcattgaggatttccaagatggcggctgagatgctgagacaggcctcatgccacttcatctgcctgcgggtgtgcagagaagtcagcacaggggagcaaggaacgggctcagggagcgggtcttgaccctgcccccaccgccacccttggagtgggcgcccgggccactgacactagcttcatctccgaggagttgttgagcagggccaccagggact

SEQ ID NO: 369 - DNA, 1219 bp, Homo sapiens
cagggccaccagggactccactttggtggagtcggggcggaagcaggggtggtcagggttcaggatcttgccctcctcaggcatgcaggtctgcatccaggtctcgaagaagggcacctcagctcctgtgcgcgactcggacagaatcacctgggaaaggggaaggggggcaccagccgagtggggagggcgcggcgcctgccagcgctggacctggggctgcactgtttcccgccaggctgctgctccagcccagcccaaagactggggacgaactggtctaagggagccagacgggggcaatgctgccacctagtggtcaatgtgaacatagggctgaaggtgcctctacggactccagcccgggtgggcacctggtttctgaggcccacagaactaactggctgagaggctgcgggggcgcaggcagtgaggtggggagagttccgggttacctccttcccttgagcccccgtcccggtcgctcccctctctcacctctgaaccataggtctgggccacatggcacagcatgaggaaggagatgtcaaacagcagggcccggacggaggccggtttggctgtggaaggacgggaaggctgagctcccagacgagggcaggggggagcccgtgtctgggttgacagggatcgggatttgcctctaggaaggtcagggaccaagtggctccttcaaagctctgaggctcagaatccttttcttgagtctcaactggaacatcatcccttccttgagaccaaagacccccagcaccctctcctggcatacctaaccaagtcgtaaagggatgagggggggaaggagacacagggatggtctgggaagaatccttttccagcattatccactttcaagctctgtggaagcttccattggtcatggctctgaggagggagcacagcctccccctgttgagctggggagccctcctccctcccacactctcccgccacacccctcctcagggcccactgggcctgcggatgcacagggctgacttactgctttcttcgctgccataggttgtgaattcattcaaactgaaaggaatggagacaggctgcattgaccagggcatgagctgagcagtagctgggcgctggggctacacatgttcagagagcgatagctagagtctgagttactggttaaacttaaaatgagacacattgctatagaaaaaaggtttttgtggtt

SEQ ID NO: 370 - DNA, 793 bp, Homo sapiens
agaaggatttttattgttagaagatttccaaggcctagagaatggctcactgaatggaaccatgttctatatatgtcaaattccagggcaatcaaaaaaggcaacagaatttgagagccccttattaataactgggcatacttggaattcctccatgcccaatgttcaacacctcaacccttaccctcatctctttaccaaacatgtccactccatcctcagctgaagagaaaggaacacttaggtcgtgagaacaggcccttcctccaagatctccagccaggatgctctgcctaggcccgtgggtctctggatgagacccagacccaggcacctgactcctaccctgctacctcctcccaacgcgcagcctccctgcacgccctggggtcaggggcttggccttcctcacttgatgaatttccgggcgaaggatttcagctttccagtggcggcggcggcagccagcagcaagtccagactcttcccggacagcatgtggcccaggactcccagcagtccctccggtgacttagagtggtctgcatccatcgtctggggacaggacaggaaatcaagtcctgaagaacactgaagaccccccacccaagatacagcctagccacattttctctcttcacaacctggaatgtaatctacatctttctgacttcaatctggaaaatcattcctaaaacccacccctgctctccgatccatccctctcatctacactggcatgcaggtggtaaggttggagtgggcaaggtcacggctaggatcttctctgtcc

SEQ ID NO: 371 - DNA, 547 bp, Homo sapiens
acgtctctgttgtttccatgtgagatggcctaagtgaaagcgcctactgcagtgcctggtgtacaaatgaagctcccacgggttagcattcagtggtagctgcccttgcctcccctttcactacctccaaagcaactatgtataaaagctaaaggagacagaggtctgtggcctctgtttatttatctgcaagcagatggagcactggaaagaagaaagagaagactgtggtggccagggaagggcacactcaccttgaggatgtttgtgacagtgggctccgcccggaggatcagctggatgttgggctggatgttggcattctctcccgatttctgctggggtgcgtgctctcggtccgctttgctgtggacatcaccagttggccaaggaagggaagaggaatgaagagaaattcttgacacgttccctcgttcaagcccggaaggaaatgcgcagaggaggtgggaagcatgtaagaacctccgaggttggggtgaagtttatggaagcatagtcaatgttgcaatcactgatttagcattag

SEQ ID NO: 372 - DNA, 863 bp, Homo sapiens
cagcctaggatttttacttttatcacaaagatgggtatgagttaaagagcagtgactaagagtgtaaaactctggtctgaagacatctgtgctttcttttccttcctgttccctgtacccccaggcacggtcccagtcacttgcagcccaaactttcgacaggaggttgaaaggcacgcagcagccccaccgtaacaagagagaggtcaaggggctcttggggtagcacaggtgcgttcacacttaccgcttagccataaggttgttgacgctggcctcagacagaagcccctgcttgccacattcttggagcaggaagtttgtacagtcacagctgtgagggagaaagatgctgagggaactgggcacctggataggatggtgaggggtgggagtggcaggtccctgagcagcatcctccctctttcaggatgaggaaaatctggagtgcctgagggacggtagaggggctctggggacttggcaactgtgggctcctatttcctgcccctgccaaggggagtgaacaaggagacagagtcccctgaggcttctctggcacagagatcaggggaagagcccagaacgccttccagtagggcgggggtgaccaggggagctcatacttgcagcgctggtcagctttgtccaacaagggggtgagcttcagcaggaactcaaaagcacagttgacatcctcagtgaagtcctagaaagaggcagaagtgtccatctggtttccagggccaccaggccctgatcatctcaggcaaccttgtctgctggaggcatcggcctgagttgcctggctgctttctgcctggagcctgggtgtatgttgtgggtgcacgcagacgctgaag

SEQ ID NO: 373 - DNA, 1495 bp, Homo sapiens
tgctgaagcatgcacattgtgaagcacgtgcacgctgaggtgtacactcacatccggctctcttccaggcatgagaacactgcccagctggggcctgaaggaccctcccctttgcccttatttctgctcccatgcctccatctcaatccccaactcaccttgtctccatgagagtacttcttcaacttcaccaaaacctgtggaatctagggggtgaggcagggggaaaaacaggaagatccatttcttttctctttcatctacccctgaaggcatccccccgaacccctgctccaggaagagagacaggaacactcctaccctgggagtgagagcacacttagtgctaaatgagaaagccaataggtgcccaggcccctgatgcccccaggcctaggcacaggacacaagcaccctgcacctccgctagctcaacagaaaaagatgccataagcaaaagtggatccccagcttcaaggaggactggggcccctttccctggctccctttactgccctgcacctatctgtctgatgaccaagctaaactgcacctctgtggtaagaaacaacggagtctgccaaatgggctaaatatagccctggcactttcagagaaaatgatcaatgggaacttgcactggaatacctggcaggctgggcccagtgcccgcagggaggaacacagggcaaaggtccagggtgccactggtcttgctaagaaccattcctagactggctctgcccctcccacgtccccagtaccttgaggaaagtgaaagctgtccacttgagctcctccgtaccctcgggagactcaatgagccccacgaagcaagctttccagatctccaggacaaaaagtggggtggggatatgctgtgggaagagccaaggatgaggcctaagagggtgcccataccccgtcacccttctgtggactctgaggatttggctgggtcagagactgcatggcagagtcactgctcagctatgtgctgagaaccaggggagtaaggtccaatgacagaagtgtgcacgactggcacccactttccatcatggagcaggagaaaccccacttctcccagggagaaccagaagaatcctccctcctgcccccaacaggctggcctgccttggagaagggagagccactcggcccctcccacctgcatgcgcttcaccatcgtcagctgctccaccagggactgcgtctcgcctgtcaggttcatggtgccctcgagcaggatcacggcgtggacagtggggaagccggtcttgtgcatctgctccgcatgcacagacagcatcgtggggatgctgaggggtcacaaacacaggggacggtgtttggggggccaaaggtgaaggcggagaggatggcacgggtgccacatcttcctaccccagggcgtgtcctccctctcccttctccaccatcccccagggagccggtacctcctaatgagggtgccacactgctcggcctgact

SEQ ID NO: 374 - DNA, 1435 bp, Homo sapiens
cacactgctcggcctgactccggagctgcgggttgctgagattggccaggatctctccaagtttcaagagagaatgctcgatggcagtccaagaagctggcagagggaaggaagtacagaaacatgatgggaaacaggagagaaggagcacctggccctgaactcctcgattttggcactccctccggcacacgaaaccacacaggaaggcttcccctgaggacaacagggagggaggggcctgagggcagcatgcactgtttccagaaggggggtgggcacctagagctggaaaccccagagaccattcccaaaagcctgatttccaggggacacagccagctgacttcagaaggtatggcatcacacaggctcaggagagagaggcagagggaggccagaatccagtggctggaacagggagggcggccacaaatcactcgaggagtgagcggatcccaaagtccagtcttgcagaggctgtcactctcctctgggggaactgggtccctaaatggctttctcattctcaaccactccctcatctaggcattgcgtttgctgccctcccctgctgaaggcctcttacacactctctctcaaactcccaccatgctctaagcttctgttcaagccccagttcctttagcaactcacccgactggtctaactcactgttctctccttaatgcccacactcatggtctaagccatattggttagcactgaactataagttacttatcctagttacaattccagagggtcaaatgatgaataatggcaccaactagcccattaacctccatggagcataaaagggggaaaaaaagacaagacctgagatccattaaaattcagtattcatccgattttcagccaataaacatttatcaagggcccaaggtagggaagaggctgtcaacacagtccatttttatataaagattgtctttttggacttttcacaggcagtaaaacatacttggggaagaaataaatatactagtcctaaaacaagctctccaaccaggtcctgaagcctcgagagtagcccattctagcattcttgttcctggagaacaagagacctgtaggtggtcccaagccacttgggcttcaaggagcaagactatggccttaggaccccattgctggaaatactggcatcttccctcccgccaggtgatctgtctgttctcaggctctggaaagtacccaaacttaacatctgaacttgagtcaagaggcatatggtacaacaggcccaacagcagacaggcactgtgttaaaaggggcattttaggtaacattcaaatacaagagtcatctgcttccaagcgatgagtaacatggagacaaacacaataatggacactgtgcttgtcttgtcctctagttttttcctcgtctgtgatgtactagtcttgctac

SEQ ID NO: 375 - DNA, 1479 bp, Homo sapiens
gctcgggtgccaccctgcccaagtccctgggatgtgtgcaatgcttatggggagaaaaaaaaggaagtgggatggtttcagatcctcctggaaagaggtgggatggcatcctgcctctcccttctcaattaaaggaccggctatgggagcagcggcaggtggggctcaggggaatcaagggacatacaggcctcctctagtttggcgatgtgcagcagggcccggttcttggtgctgctgagggttttctccaggcgctgaaggcacatggcaagctgcttctccccagcggctggagtgccggcctccagcccctcccgcagccgctctgcagaggctgccgtgcagcgcagcagccagtggagggcgctaagaagggctcggcacagtccgatgcattcctctgctttgccgtgacagctacagggaaggatgcaaaatcagactctgttcttccaatggctgaaatccgacccacatcaatgttccccagagtccctggcactcccctactagggactagggctgagaagctagcaaagtcctggggaagatgcttagcccctttggctcctactggacaagatttcaaatgagctactccagacagagaggaggcactctgtcctaagggagtaagaaaaggagggcacaggtaagtgtagatgggcaggtggggagaaaaaacgttggaacccggagttggtctcggtctgtgtgctaggagctgcacctctgcacaaagacaaggctggaacattgtattgtgagcccccttacccctgcccttacctcagacggtcacaaaacatgtccatgatgtccagcaatgcctggacacacaggtcccgagaaaagtcatcaaactgtggaaaggacagtggagatgctacggaatgcctccatccacccccaggtctcacatgaggcagacggtgcattcaggactcctgctcctctctcctccaaccctgggttccagactcagcatcctcaacactggacattggctcccaagcaccagcccctacttgccaggatccccctcccatggaagtccagcaatgccagccagaggcatcatgtgctgcctatccagcctcacgggtcacagcatcagggccgtcaaggaggcggggccttgtctgtcatccccaatctagctcctgagtgtctatggtcataccttactgatggctgtgaggacagaagagtaggacaccatctggagagaaggaagaaagataatctttagacaactagtctcccacagttgagaggaacaaacactgatgcttcaagttgctgcagctctcctgaacctcaaccccttccacaggccctcttcaacccaagcaaggagaggcagtgtcactgtgcactgccctgttcctgcctctgtcagacttactgcaaatggtatcagcataagcccatcaagaagatgattctggggatgctcaaaggctccatgtttca

SEQ ID NO: 376 - DNA, 913 bp, Homo sapiens
gccgtctgctcaatcacctgggtttggcaaactttccatccatgtgcaatttccctctcaccaaaatacactgctctgttcagccatctttcactagtactcctgggtgaacaggagcaaaacacagagggcttaaataccatcagtgttcagaaccaccatactgtgaggccagggctagtgtctgatatccatcagaaagctgggagcctgcctgggcaggatgaccataacgttccggcgagcgttttgtttatttataactgatgtccccatagcgagtgcttggcaaagaagtgaaccttgctggataccaacctgcagggggagctggatgtccccactgaacactgaccctcaaatgccgggagagaaacccccaattatgcatgttccgagggatgccattcgtcaaaatgaatttatggtcttcaaattctgaattctgttcagcagatttctgctaactgtatcaataaagcacggctacttcagagacccaaaaatgctttctacatgacgaactgttttacacagcaggatctggcctattcaagtcttaatcattctatcacagtagaagctctaaaccaccacaggcccccagggcaggagaccctctgtgtggccaccatgcttgtggctagccccacctgaccctgcagctgctctcaaatcctctctgctcttctgaatattcaacaccccaactactcctaagtgccctctactcgcataacattgggccaaagagcctcttgactctgaaggaagaataaattactaattttgcacagcacttgagagggcacaaaggtctttcatatctatttacttctgttacttcagcctctttctctttcttccctttcccatcagtgtttatacatctcaagactcttctattggtctg

SEQ ID NO: 377 - DNA, 623 bp, Homo sapiens
gggcccaaatgcactccaagttttttacccccagaactctcacttcttggtgggggtttgcgggaagcttacctgggaactaatggcatacttcaggtaggacaagatgagaggattgggggatggtccaatcatggcctgctctagtaacgcatctgcaagaggaatagcaaaacacaactgagtgattacaacttctctgggtttatccctcccatctttctttcccagttcacttgagacctgccaggttgagaatatcccaggtggctcctttaggaaagaatttcttcatgttgattgcccattggtagtcactccagcgctccttccaggcttgcaaaatggcttgcttcaggttgaccaccttcattatttcactctgagcaggtggcagcggtggcggccagctttgaggtgaaagaaatggagctaaagaaaaggacatgaggttctaaggagaaccggggaaggcagaattaaatagaaaggagaagatgcgggaagatttaagcgagacagaggaatttgaaagaaaaagagctaaagggataaagtaagatcctgtcagactctctcctcctgaaccgcccttccttaaactggggcactaagaaagtatc

SEQ ID NO: 378 - DNA, 834 bp, Homo sapiens
gtatcaaagggactaatagattaaacagggcatcaaggagttaaggcagtcctggttgcctaattacgcccttagctctaaaagcgtcccttggccaccaccattccaagtccagatttgctccctcatttcctccaccttctccagccctgtaactatacctcccaatttccttttcatccaccacctccccaaatttaagcctaccgcacaatccagttctaggtggtaggcatcgccattttggcacttgtcaagaagctcactttctattggctgggagtaacaaacgccaaccaatagaaatgcagcaaggaacgccccgctgtcttctgggaatggtagttccttggactgaaaccgtatttgtctgcgccggcgaggaaactaagggactcgtctagtcggcccgcattgttcttctcctttaagggaggacatccaggagctgaggcactacagagactcagggactcgagggagctcgaaaggccgctcacaacccggcgtcgcccacgacgtcactgtcgaccgggcttctccatcatattccgacaccctttcattcgttagcccctagttagtaggtgcggcaagggtgtggcgtgggggcaagggtgtggcgttcagcaataaggtctttctcctttcctgggctctttctgttctcctaagcccctggagctaccagagctattctcatttccacaactatattctaaaagcgacaccgaggtgccttagttgcacacatatcaccgtccccgaatcttacagtcctatcagaatctccaggccctccatacagcttggatacaagggaaagtaaagagg

SEQ ID NO: 379 - DNA, 991 bp, Homo sapiens
tgttccaaaggggagagtgtggctgaaggagggtcagatcatgtcctcctgcggttggtactgcctatggcctttcttcctccccatacattcaatccacacccctctcttaggctccctttgtgcctgcccaagtgacaccattggggaatagtgtgtatacaaaacagctgccaaatatatgttgccaaagcttctaaagcaggaaggagggaaatacggattcctcacctcaccttccagatgacccccggccactccactcatacttgagactgccacaaaccctgcttctcctcagtctctcacatatctgacttcccctgttctcccaggcccctcactctacctttgcctgctcccctgctgtcattctgtgcctgtagccacagcctaaggccctccacctggagccattcctggatcatcctggagcccctgtcgcatacctcagagcccaaactgcctctcttggagagaagctgtcaactgtgtgtccggtccacacaggactggggactatttgggccctgaggatggtgatattttgagctcaaaccattccctctggcagggagcctggcagatttctagggaggtgcctcctccccacttcgcagtgacagggaggcggcttttgtagtcaggccatctgccttctctgtctccccacctcccaccagcagccctttctctaggcttggcaaggtttccccaaaggctggactcctatgtacaaaggctcccttagctctgggcaaggaccatttttagtttatccactttgacctccctgcctctctagtctgtaaacatcagaggcagcctttcctatatcacctcttccttccacaccacaatatcttcctagggacccccttgggctctctggctcactgcaagcacaggaccgggaccccatgataatcctccaaagggtgaagagagatgctaacatttcctttgggtgtacaaaaaaacagccccccaa

SEQ ID NO: 380 - DNA, 1166 bp, Homo sapiens
gccctccagcccatctcaaagccccgtcctacttaccccactttcttttgctgttcatttcctctcaacagggacaggggccgaactcccatctctgccctcctagtcctgagccccaacctctttcttcatcttgttgcctaccttggctagagagagaagaggggaaggtggaagtcaaccagtcagagtgatatggcaaccctggagaagtgtcagaaaagcagctaggccagagtggggtaagaggtggcaaggaacagggttctgggtacccaaagggaagggaacattccttatctatctaggctagaaaacagtataaagaaaagtggcaagagtccagacccaaaaacccagaaacactgaaatcgttggtaaagcatacaaggcacagagggtgtcagcttcccttctctccatagggaaactgagtcattccttttccctaagtggaacattttcctctggaagcttgcctgggtccccccactatgggcagcaggtggatgggaaaagaaagacagtcactcccaaacacttatacacagctggctccaaaccagtctcctcctcataccagtcaccaaatcaaaatccctgctttctgtctatctgggggagggaatgatgggaaagaggtctgcaaggtggctgcacctcagggactcagggactacccctggatcccccacagttgcctgtctctgtcttcccactgccccaggagagtgaaaggcagaatttgaatcaactcttggaatagcttcccctctaacaccctggaggatgccttccctctccatactcccagcacaaagagaagtgctgtgatcctgaggccgacagtggctgggaagggagggcagcctgccatttcctttgtatggcccctccctccaggccctgagagctgctctgctttatacttttggcttccatatcatactaccctatcccctcctttaactggagtgggagaactgcggaaaggtaagccccaaactctgatggtaaaggagacttccctgctccccctcctctcctctctcctgctggcaaagataggatgagaagactctaagggaaagtgaaaccagaagctgggagcatttggggaatctaatacttggcacatattaaatgcttaaaaaaaaaaagtgtca

SEQ ID NO: 381 - DNA, 1000 bp, Homo sapiens
ctgctctccaactttctttcctccatttgcaccactctttctgattgggaaacccctaggagggagaaacatctgagctttgagttctcttggctggtagtacctcagtttcctctgctgtctttccagagcacccccaataagttcagctctgtctgcagagtctagaggtatatgctggacatgtcatcacttgctgacctagggtccaagaggtcaagatgagatagaggaagggatttactgaggcccaggccacagagcttgttccatggtggctggtagaggggcctatctcctgtttccccaaactgctagagatgtgtaaggcttttgagcaggggtagaggatgctgtgtggagttttagctgccagactttgaaaaaaacctcttcagaaagatatctggataccttggttcctaggggtcgtatcctcaagaaatcttagggtgcttcctagcaacagtctggaaggaagggagggagagatggagggagagagggaggggcctaggcatggctgttctgatgggagcccagagaacaggctgttcctgctacctccttagcaacggaaatctcagctggaggggccatcagacatatcctcttggagggtctatccagccttattcatgccacccctaccctcctcatagattcggggaatgctctgaagcagaggtggggaatgggaggggacagccctggtggtggtggggggtttcatgacaaggacggaaaaggagctgaggatgaactcaatctgagaagagctagcagcttcaagaaatgggtgggcagggtgagtggggtgggaggacagatgaggcaacacagggacagtggctatacgcccagacacgggctggatcctggcacctggggagaggcctgctttgaaagcagtgtgcccttcactttgccctgcccagacctgtcaccagtccatactgggagcccaagaaaaagagagaggtaaaaagaagatgggggt

SEQ ID NO: 382 - DNA, 983 bp, Homo sapiens
attttaagaaggagaagatgggactggtaaacccttgtctttgagtgctccactctgcccctcaggaaaaaaaaaaagtggaacaggaggcacttcattttctatggctctgggtttaggatttcagaaagtcgtcaccacccaacattatagggccttgcatcaaagagagatatggtggggaaagccagaatggaagagagacaaaaccgtagcaccttcctcctccccctctggacaccatcactcctgccctgatccagattaccgctggccctccccactgcctcctagttctgcctttgtgatgcagagtataaatgtatctcatgcattgggattccctcccagctccttgagcagcccaatcccaagggactagttccatacagggtagagtacagaccctgagcactacatactgcagccttgctccccagggttccggccaaacctgatcaccgaggaggtggcatcgactggcagacagccaccctcagtgcacctcattccactcactgcactgactctgcacactgcagcctcctgccccacactgcagctgttgcttgtctcctgtgagcccagactgaacacaggttcgcttactgcatggaggctccgtacgctgcagcctcaattccccattacagctgccactgcacaccacaggctcccttcacccatggcatgccctcaacaccaccactgcactctgcacgccataggtttcatcccagctgctcttctcatctccatggttccagggaccccaagagaggtaccctcccctccgccaagcattacgaactccagtaccccctgtgaaagaagtggttccaacagcactgaggatgcaggtggctgagactaagacatgagcaagggcagcccaacttgggtaagctgtggctcagaatcccacactcgccaagtgactctgcccagtataaactgggcgattagccgagcagctcccccta

SEQ ID NO: 383 - DNA, 592 bp, Homo sapiens
ccctccccaagagcagactatgtagccagggccccaccctgagagccgtgggaaggctgtggcccccgctggtaaaactgggctaatgacagcaggggaaccggcggggccaggggggtgctggggtaattagggctcggcctggcgctaggagatcctgagatgaaaggtgctctggcgtcactgggttggttttatgtccatgaatgcaggtgtgtggtgtgtgtatgtgtgtgctgggggtggggctggcatggtggagacctctcctttgggttgggttagggggtccatttgtatgcagcccaccgtcttccttagattgactctggtaccatttggatttttgtgggagcaaacatggggggaaataccaccacccgggagctaggaattgagggggtatggcagatcttgtcccctccccgagctcaggagagggagcagattgttgggggaaatggctggtgacagagaatagaaagagcctatatggagaagggtgacgttggaaaagggaggcagtggatcggtattgatgttagaaatgagaggggagggaggtaacagggaatgaacccccacaaggatg

SEQ ID NO: 384 - DNA, 378 bp, Homo sapiens
atggacgcccccagcacggggcgctgagacccccgcgtcgctgcccagcccggtccggcgcgccacgccgaggtaaggaggagggagcgagggggcattaatatgcaaatgccttgcgattgattatgcaaagccgcggggctccgtggccagctcccaggcgggctaggggcgcccagggggtgcctgctgccagcctcagcctttcctggcgccccagtgaccctgtcacgagcccgggagcttgcaactgacgccctggggaagggaggtgttgctaggaggtcgctgggccccggggttcgcaggcggagatggcgtccgagcctccccctggagggcccgcccggcctctgtccggccagtctgctgcgcatt

SEQ ID NO: 385 - DNA, 1227 bp, Homo sapiens
tttgtttacggtgcgccggaggcctgcccccccagcccccacccctagcctctgaggcccgagtggcctttgcaaagctgcctccagctgcggagggcagtatgagtgcggtggcgcgggtgggcttgcacgggtccggggagagggaagttcccccgcctcacccgcctcccggttgagcatggctgtctggttgcaacactgctaattgcaaaaacgcggttgttgggggggaatgtgtgtgtggaaggggtgtacttggtggtgcctagatgattaggagagttgctggctggggaggagagggagaaatggacctgtgtgtgtgtaccccaccttgtttccctccccttgcaacgtgtctctggtgccccttctccatctggggccctcccttgtccagcgtgaaagaaaggcctggggggatgacaggggcaattgaaagaaccaccgttccaggggtgggggtgggggacacagaaggaaagccagtgaggtgggagcctgcccctcagtgctggctttggctccaggagggggaggggatgaagggggctgttgtccaaaatgaggggggaagcaaaagtgacacgcagacacagagatatgtccacacagacagccacatgcacatccagggacacccaggcagactcaaggacaggagctactggacacacccacatggggacaagggaagagacaggctgctgctgcaccgtggagctctgaggggtgggatatacccatgggagaccaagagcatggggaccgatccatgcacatacccacgcacagggtcacacgtagatgctgtcacacactggggcaaggaggagttgctgtcacccacacataaaaagtcactgtcacatgcatgcatgcacacagagcaattgcacacagcagcacaattacaaaagaccctgtcactcacaggcacacacgtgctcgcatgagcccagtcacacagacatcattgcttgccgtgacagtcgctgtcactcagtcagatgcaaacacagttacacaccaacacatgtatacacaacttagcaacaagtattttcctggactctttactgtggagctctgaggttctgtaggcaacaaaacccttgctcccaagaatattaaatttggctgtatgaaaaagtgttcctgcgtaatggtgtaaagcatgcattcccaatgacatgttcttggtctctatcgcttgagatacca

SEQ ID NO: 386 - DNA, 640 bp, Homo sapiens
ctgtggaacctgcagacacaggtgcactcatttgcacatggtcccctgaactcaggtgcagaatgagttcacaaggcccaggtccccacagttgcaggtccacaccaacagtcgtgtccacacaaccccagatacacacaactgcagcctgtgcagccgagcacacacttagatgcacacaatcacaaatttttccccttcagcttcctcctcccctttttcctctaggctcagccactgtgcgggaatgggctgttttttttttctttctttcttttagagggacagagaaacaagagcaaagacagtgggttcaggggggttccagagggccgagtcatgggctcaaagcagtgtccagtgacttctagaagctaggattctcttgactgttggggaaggggagagctgctctcctccctaccctaaaagctcaggggtgtctaactgcccctgctctgagtcatttgcctgggtctttcctgggaacagtcagtcacttccagctgagttcctgcgccccaccttgagtctggccctttttcccacctgtaccctcctgtccaaacttggaagctttccttaagaggccatcggctggcgagtgtctgtgtgagtgatatgtacttttgacttggaa

SEQ ID NO: 387 - DNA, 815 bp, Homo sapiens
agagctggggactggcagcaatgttcttcatacttttccagttgttaatacccaagctccgcccctctgccccccctgcgcagcctctggggtcagcttgaggttggggtggggggcggggggctcagctggctgctcaggacttcctgcacttccttagtgccgcagctgtggccagcaagttttaggggctgggaatgggggaagggggggggggtcagccactgcccatgctgacccctcgggcctgcatgtctggagacaccagttctgtgggcaccctcagggtgcaggctgcagccagctagcagctcttaaacaagccatgaagaggctccccccacactggcccaagctggaaaagaaccgcccccatgggcagtggcgggagctggcaggaccctgctgagttgggtccactgcagggctcacaatggcctttctccacacccctggcagctgaggcccacctcagagatgcccaacagctgtgtcctttttgcccagcctcagggcctggttctgagggcacagctgcctagactaagtatgtactaagcgaggccctcccacccgtgagtgcaggttccagcctagaaggggtacctcttctggagagggaatttgaggagggggaactcaggcaggagacatcgagcccgggggcaccaagcacttctcgctatgctcccctctagccttggactatttggaggtggaggcacttggcagagaacccacagggcagctacagaggggaaagactgaggcttggtctcagggaacacatagctggatgaaagaacaaggcattg

SEQ ID NO: 388 - DNA, 782 bp, Homo sapiens
tgtatatgtgagcggttgtgatgggtgaaggaagctgtgggcctggggtctcccagatttcttagagaagcttcgtggagaattgggtctcctagacatcagtgagactggggcctggggcagtgggtctccaatttccagccttctcaccgtcatgtaatcttttcctcccagacaaatttttgcagcctggaatgagtgtatgggaaagagcccaaggcaggcccctctgccccaccctcctttgaccctcgcccttcagcttacaaggagcccttggcccctcagcctgggacacaccccaccagctaggggcacctgcataaatctttgggcatcactgcatctctgttcagggtctgagctctgggggtgggagagagagaacaaggaaagccgtcccctctcttatgtgtgggctcaaagaggaggcagtgcccttcctccctcctgggagcccagcattggtcaaccaggacccagctctggctgataggcaccagattcccctgccctccatggagtggtacttagtgtgaaaggtggtggcagagagaaactgaagcactgagtaatgaccagtgtggtgggcacagcactttgagatccagcatctgtcctgggttgcctctttgcctttgtgagtctggtgatcaggatcccctctccaaaccccttttatttagccctgcccctcaaggtgaaggaaggacaatgggaggataccctgtaggggtgacgggaagcctttggagtgggaaccaatctcaactctagttctc

SEQ ID NO: 389 - DNA, 854 bp, Homo sapiens
ctgggttttcattatctagagacaatggttcctgtctcactcaggttgagggcaaataacacaaggtgggatgacccctgtgttcaatccatgttgcatcctggcatggtgagcaatgcctgtggattctccttttttcccagggcctggcacatgccagggtggggcatacacatgctgcctggaaccagagacagttctcagtctctcactgaagtatctggggctggtgtgtggtgggggcacatgtggttccaccttggtgtcacttggcaggccaaagctggggtcatagggacctccctccggtatgccattgcgtgaggtggtccagagggagggtcagaagtttgctgggtagacaagggaagcaagatgggtgttactggtgcccaggaaatactatccttgcttcgctgttttgggggtgggcattaaaggttgataccaaagcctcagccatgcccctcagcagtggccaagagcagaatgattggaccaagcccctggcccacctcctcctcctcctcttttcctcttctaaagaagagatcggctcttggctcccagagccccagctgcctgtttctttttctcttttaccaggcatgggggtggggaaacaggggaaccgaggctttggtgtctttcggcatttttgtacacatcagtgagtgggtgtgttgtgcacgcatccatgtgagagtgtttttgtgcatgtgtgggctggggagggctctgaatatctcctggaacggtacccagagccctgtggctctgcgcatgcggggtgagtgtgtgtgtctgcacgtgtccgtgtgtgtgccggagactcagctgcattcacgcgcgcg

SEQ ID NO: 390 - DNA, 1579 bp, Homo sapiens
ctgcctctgccagttctgcttggttaggggctagctccagcctctggggtgcctgggagaacatccctccctttctttccccctccaccattccctcccctcctaggccatgctcttcagggcttgcaggcaacttcttctactgccttagatgagggagtgaggagggaggaccccaagccttgtgcccatggtgccatctgcagcaagtgccttggccccgtgacattcatgcctccagcattcagctgccccagctcccagctccaattacccgctggctgctgggggagggtggggagaatgtgccgtgcccagcttgggggtgctcctgcttctgctttcttggctacttggatctcctgcctccattcctgaggggaattgggcagggggggcgtgaagttctgtgggctgataaggaggggctgagttctccagcatgggtgtgggcatgaccacccaccagtggtcatgggggatggatgtgacctgggaggagacctccagacctgggcacccaccttgatgcctggctggagctggcccgggcaggaggagggagaggagagcagcaggtgggtgaggctatgggggagccgagtgggaagcagtctttgatgttaatactgggcatctggcccaagtcaaggctgctgtttatgtctttctgtctctgacctgcagggggggtttcctgttatattcttttggggcggggtggggaggatcctttgtttaagtaaccaatctcccccttatgaggatccccaccccatctcccattctctagcctctaaggtcccacagtggctaggtgatgagtcactgccccccagctccagaacctgtctcctgggggcccagtgagagctcaccaaggggtgccgcctcccctcctcccgtctcccccatgcctgccaggctggggccctgagtctgtgtgtactcctctgccacatcacacctgccaaatagtaccttccttcccgccttcactcctcctctccttcctggcactaggataacagagagttgggtggggcagccctgctcaatccatacctgagaatagaacagggggtatgggaaaggacagggagtcccggtcctagagaggcctctgcccctcagcatgggggcacatgtcgctgctgcagcactgccaccaccacagactcccaggggcccttggtgtgggtggctgcctgtggtgcccgtgttggcatggggggcagtgctgcccatagacgcctgtgcccatgcatgcccatttatgtgtctgggccacggtggccgccccggcccctcagcatcgcccttcctggctcccatggtgggaggctgggtgatcaggagtgggtggtgggggagggatctccccccaccctagcagcaggcagaggggaaggggagagggaggtgtgaacctacccacagaactattaatagcccacatgccaggccaccaagaaccagctgtcaccgtggaaaccattcctacgcccccctccccccagcctgcatggggtgggacttagacagggtacgaagccccccacccatctttctttgttac

SEQ ID NO: 391 - DNA, 1459 bp, Homo sapiens
agcctttttacccctcctcccatctttccacccttttctcagccgccccgcatgtacgtgtccctgtggctggcaaggagggctgggctttcttcagagcactaaggacaaagttcaggggccccagaaaggtggggccaaagcccagagcagatacgcaggagggttaatgcgggtagtattgggggttagatcctggggacagaaactcccctctggcagccccaggagtcctttgggggtgtcctcagatatacaggactgcagagtgggacggctcggcagtgggaacctggcggggcgcccgtggatgccgcattggccccgtgtccctgtccccccatggcagaagtacttaagcttaatgaaatgcttccccctccacgggcactttgcctacactgcctcccagcagctcttatctcacaaggagggagtgggtggccaggccagccgacaggtgggtcttgctgtcctgctgtccagcctgggcacagaaccccatagctccgccccctcggcctccttggggcagggcctccctcgcctctgcagaggaggtaccaggaaggagtttggggagttaagctggactctggaggaggggtgagaggctgcccttcagggtgggtacccctgccccatgccccttacccgctgacctttttctgtccgtggctaacacaggctcatgtggtatgtgtctccccacatgctgggccctctgcctcgcctctgtatcaccccaaaggcccaagtgtgtccctggagagatgccaaggagtccccaggggttccagcctctttctgggtacccagtgagggtgccctaggcagcaagggcagcaccttgctcctctgcccactaccaggggctgactgtagctgggctgcactgcccagcaccagggcaccattcagttcaaaagaggggtggggcagagagcgagtctgcccctccccccagtgggcacgtgcaggcccttggcagtacccagacacatttggagttaaggctgggcaggagagagggatggggaaataaacatggtggcttaggttggcactgctccaggtctgcaatgtagcaactggtaagtggcaggggcctgggggaggggaccctcaggagccctggcctggggcaggagctgcccatgccatgtggctgccactggtgttccccgcctggcccggcccacagcagccagtgctcattcctgcacacactggtcctcctcggctgcccccaggacctgctccccggggctgcccctctctcagcatgcccactcctgtgcttgcctcctcccctccctgggggcgcttgggcctccggctggcgagtggatttttccagcttctgtaaacaagtggtggcagtgtgccaggcgggcaggagacaggcgggggcagcaccacagccagggtgtgccaagcaccgaggcacagcctgggg

SEQ ID NO: 392 - DNA, 723 bp, Homo sapiens
cctcgctggacgtggagtcagaagatcgtcctctattgtccagcccaacccccgtagcggccctcgccccctgcccctcactgtctggctgagagcattaggccccagtgcccagcccctgggcttccccacccactccttctcctccccaacctccaccccttagggctggctacgccattataaatttataacaggaatttctccacaagccaagaaaaacttgacctactttcttgatggctccctgggctaaggctccctgctcatgcccccccaccccagtctcctgtccagcccccagtgcccagtcctggtctggggtgggtatcagaggtagaacgggccacttttctgtgcaatgcccatgctctccacactaccagcttgcctgggtgcagaggccccgttctgctgctggccctgcccaatcccctgacttatctccctctctcttcccaccctggctgcttatcagctcctgggggtggggccagggggcctaggggtgaggtctcctatgcagcagccacgtgacagaggttgaggtcgtatgttggggagctgtaccctttgtccccctcctacccgccacacctgcctgtgtgcacacagacagtaagccacaggtctgcagcccagggtcagaggtgcaatgccgtaggaatggtgggcccggcttggcactgccctggactccaggtagcagaacaaggctagcat

SEQ ID NO: 393 - DNA, 1366 bp, Homo sapiens
tctcgtgccctctttggagggtacagattctctctccagttaatatgtgttagtttcctttcctttcccccttgccatcctggtcgatagcagctcagctaaaccaactgagaagtctggtcctctgcctgggaagtgggattcgagaccttgcgtgggaagctctggagtccctgaggggccagagttggggatcataacttggctggcagcatgggaggtcagttccctacagctttcaacatctctctctattaaggcacaaagatgggcattcatgctcactgcgtgccgctctatgtcccatccttccttcacagataccctccctgcctatgctgaaaactgcttgtctctggtcccctcttgcccctataatacagatgagtttcaggaaagcttttctagaggggtggtaacaatagctagtgtttaatagttgctcattaagggccaggcatttgtctgaatatgaagactgagacatattacttagtacatgaatgatctcattctctccctccattccttcccatgtctggggcttaggaggtggatctccaatctcgcctgctgtacctgttatctaagggatcatcctggtcccctctctatgcctgcccttcctgccccctgctgtcttgttatgggatcccaaagccccaaatgttgccaccaaagggatcctacccaccttcctaccgtgacaccttcttacccctgcctctctcttctctccacagggatctctggacaggacaagactccgaagctactcccccagcacacagcccgggacccacaaacccagcttgcccccagccctcccacctgccactccctggcccctcccaccgcccgccccccttggggcgcagggcatggtgtgaaaggccaagtgctgaggcgggtatcatgggtgctgtgccctagggcctgggtggcagggggtgggtggcctgtgggtgtgccgggggggccagtgtgcccaccccagtctcttggcgtgctggagggcatcctggatggaattgaagtgaatggaacagaagccaagcaaggtggagtgtgggtcagacccagaggagaacaggtaatgggttcagcaactaggtcatgccaactcctaagcagcaggcatgggcacctggctgagctctcctttaggcaccgcctttaagcacctctgtgggatggacgtgaggccagcaagccttctgcctacctttgtctggcagatgaagtcatgttcagatgtgacaggcacttggattgagagatgctcattttgaagcggggagcgatacagagcaattacagggagcacataaggggctcttccctagacattgctgggcagtctcag

SEQ ID NO: 394 - DNA, 1343 bp, Homo sapiens
ctagacattgctgggcagtctcagatgcccccaacgtcccttccaccattgctgcccttaccttgagcatgtgggatccaaacagccttgccattttcttcctctccctaccagcccatttactatctgaccacaagtgtgttgtccacaagctgcggttcacgtaatacatttcagggcacatgcaccagtaactattggtcatagcccaagcttatattcggaatctattgggagccccacaagctcttccttgttcatggtcaagggcgggcactgcgatggggctcctcccagaaagtgcacgccaaccatgatggttttgcttccacatgggtgaggtgtcagccctgcacatacaccaagggatggttacctgtgatctgcattgcccttgaggagcccagagggtctctgtcttttctatcagctccaagtggcacagagctttgtcccagttggcacggtgccctgggagctgggtacagcctgtgcctatggccagggagagggtgggggtgggggtgctccggggagcagtgtggctgactgttgcctaggagatcagatcccgagccaggaagccagaggcctggccaggcaaagccctaaggcccacaactgggtccctggagggtagaggaagtagatggaactcacagctgggcagggcatggggtagctcccctcccccaaagcctcaccccaggaaggactctgaggacgatctggcctgtcgctgtgtggctgtcacttgcagcccctgtgtctcccagcttaggcttctgtgggtctggaagagtctgtgcttaatgtttggagaaaggcaggaatgccagttcccagtctcctaagactgcaacccctcccccatcaccttcccctcccccatgtctatgcgccaccttgtggctatctctaggactacactcagaggctgtgagtctggtggtaactgctgaagccgctagctcaactggggcctaggtgggctgagttcccctgcacccaaccctctgggaggcgtgagggagacctgacctttcagcctcataggaagtagaccggagtaatccccacggggcgtggagcatagggttgtctgtgactgtgaccctggccaaggtcactgtgtcagtgtgttgggagctgcatccggctccaggaggaaggggcctgcaacatgccacacgcagggtgggtgcgggaggttatacaatccttgcatgcatgtagagggcttatgtaacctgtgtgcaccgaggttatgcaacatgtatgtggagagcctggcaacatatatgtgcagtggctgagggttgctaataatacgctgcacagag

SEQ ID NO: 395 - DNA, 1481 bp, Homo sapiens
ctgtgcagagggtgtagtgttttctattgctgtgggttatttagcatgtgtgtatgacctggagctcaagcaacacgtgcacactggagggatgagggtggttttatgaggtgcctgtgcagagtgttgtgtaacacatgggcatatcctagaggttgtatagcacatttaagaatgccctgaaaatttcacaggtatgttggccctggtgcatactcaccatccatgggtttatagtgaaggttgcatggttattcatctgtgccggtgttatgttgcatatgtatgtgtgtgttctaaaggctacatagctttaagcatatcctgagaattcttccagcgtattcgtcatgtactgaaagatgaggatgtcctgcagattatgggtgcttcaggtcttctggcgggtgaatgtgtgtgtgttggggctctagaatatgcttgtgccacagccaagccccttatctctctcccctgcaacttccagataactggacccttttaagcattgtcagctgaccctggggggtgggaggtagaatgaggacacaaaatggaaagaatcaggccttgggggattgcataagcctctcggatgagaaaggggctactcgaagactgctctgtgattctgcccactttgcctccatccagtgccaggtcaccagatggaaagcgaaaaagaaagaacggccaatgttccctgaaaaccagcatgtcaggtgaggctggctgtgcgtgccccttctccacgtccccaaccccaccaaacccagccagggctcctctggacctggatgtggaacagtaattcatgtgttccctggggggagcctcctagagggcttgggatggacttgtctgggggtgagaaaggtaatgtgggatgtgcccagcttttgagggtggattaggtcaggacggcctcttccctcttcccctaataccctcatctgaggccctaccagaatcagggcctgagctgaaggactgaggggctgtattatccccagtgagcagctgacgtttatttttccctctccaccatcctctgccttgtagatagatcaagaagaaagccctgaatgggcagtcagaagaactgagattcttcatactcttagggcagagatggacaggttcacctcgtgtctctctaggattctaccagggaggctgggctaggagaggggtcagaaacaaaaagttgagggatggggaaaagtgtgagagcctctctgctgggactccaagccatgcctgccttcctccatcctttccttcctcccagggtatatccctagttacctggacaaagacgagcagtgtgtcgtgtgtggggacaaggcaactggttatcactaccgctgtatcacttgtgagggctgcaaggtatggaagctacctcctgcccctcccctgccacctgagcccccatattactccctatgtcacctaaagcccgcctgttaggtcatcac

SEQ ID NO: 396 - DNA, 935 bp, Homo sapiens
gacttggatttccaaagctgctattccttaaggcctcacattatcccaggttcaaagctgcctgctctagacatcattcctgcctctgccacaaacactacccagacacccccaacccctcagcagcctgggggctgagggcatatatttctcaggtccttgagcctagtaatcttgggctcatggtgtcaggaggatgccaggtcccctcactgatcttgccttccttgctctccacccctgacccctagtaaactgcatggttggttcaggaaggggaagccatgtcatgatcacagcctgctccatctcccccaccccagggcttctttcgccgcacaatccagaagaacctccatcccacctattcctgcaaatatgacagctgctgtgtcattgacaagatcacccgcaatcagtgccagctgtgccgcttcaagaagtgcatcgccgtgggcatggccatggactgtaaggggcccaggtggagggaatagagccaggtggcctggggtggggatgagttctgggagggcagcttccttccagggtaccctcagagcccacagggcagagtggcaatccagtctaggtcagaatgttcagtgtcttggtccttgctgtcctccttcctgcgcaaaaggaaacaggatccctgtgtgggccccaatgcctacctgccttacaacactcgagggccttagagagggagtcgtttggtagaaagagctcctgggcacccactctagcacactgttcttgactcccagcgaaggcaccccacttctagatgagacagggcatcttccattggctggggattgggtggcaggatattcgagtaaccaccgtcaccataatccgttagaccagaacatgatattcatctggatcagcccaaactgttgttgacatggtcccggggattaatcatg

SEQ ID NO: 397 - DNA, 474 bp, Homo sapiens
gttactaccgttgttattattagctgacttggagctctggttctggtctattctctgctcaagatgaaggaaaagctttgggcctgggactcaggcacgggcggcccctcttccccaagctgccttggagctccccctggtgggcagggagcctcagtgagaggctgaaaggggtctgcggccccagctgacccccgtctttctctctagcccgatgacattggccagtcacccattgtctccatgccggacggagacaaggtggacctggaagccttcagcgagtttaccaagatcatcaccccggccatcacccgtgtggtggactttgccaaaaaactgcccatgttctccgaggtgagtggcagaagtggggagagatgtgatgctgtgctggagggaaacctgctcccccggtcacccagtacaggctcatctgaggttctctggacaaggagcaattcctgtaggtca

SEQ ID NO: 398 - DNA, 806 bp, Homo sapiens
agccgttcagagtccatgggggccttgcgggcctcacggctcccgtaggacactctaggggagactcaaggacgcggggaggggtatgctgagtgctcctgtggccctgccgctccacagctgccttgcgaagaccagatcatcctcctgaaggggtgctgcatggagatcatgtccctgcgggcggctgtccgctacgaccctgagagcgacaccctgacgctgagtggggagatggctgtcaagcgggagcagctcaagaatggcggcctgggcgtagtctccgacgccatctttgaactgggcaagtcactctctgcctttaacctggatgacacggaagtggctctgctgcaggctgtgctgctaatgtcaacaggtacctgctgattagtcgggagggctcagaagcttccaggggtcccagagattggctggaccctgggcctgttgctcaactccctcctgaatcttcttctgggctacctctctgtcacctgggccatcccctatcccctgttccttgctctgtcacacacttctcactcgttccccaggcccatcccttgcctccccatccctgctctgtgccttttcctgtctttgtctccttccttctcgctgccctgtccctctgtcactcacattcccctttgttccccactccccactttgttctcagccaccttccatcccctcatccctcctctgtctcccagtcccatctcttacccctcagtcccctccctaaccccatctgcaccccgcctctctgaccaccaacctcagtcctccccactccaagg

SEQ ID NO: 399 - DNA, 1046 bp, Homo sapiens
acagaccgctcgggcctgctgtgtgtggacaagatcgagaagagtcaggaggcgtacctgctggcgttcgagcactacgtcaaccaccgcaaacacaacattccgcacttctggcccaagctgctgatgaaggtgactgacctccgcatgatcggggcctgccacgccagccgcttcctccacatgaaagtcgagtgccccaccgaactcttccccccactcttcctcgaggtctttgaggatcaggaagtctaaagcctcaggcggccagagggtgtgcggagctggtggggaggagcctggagagaaggggcagagctgggggctgagggagacccccccacaccccttctctccttcctctcgtccttggatagattcagctcccacacacacacccgcactgcccaggtccctcctcagacctccagccctgggacagggcaaacaactgaacttgctatggaaaggacagtgtgggaggctgggggagctgtgtcctgcagttcccaggaccccatcctctcagaaggtaggggaagggcgggaggattgagaagggacaagccaccttgaccgtaggggaaggaggaatgtgggctgggggaagatgccctcaactcaccccctacacacacatgagagagagcccccacccagttccttggcctaggtctcccctccaggctgagggcctctctacttccccagatgcctgggtgcaaagaacggcttggcttggctcctcctctggaggttaaaatttatagtcattctaactgcactttggaaaccaagcaaggggagaagacaaatgaagaaaaactagacagagagaaaaatacaaaaaagagagagcgagcgatagagagagatgatattaagttattaactgaggctgaccagaggggaggaccccccctttaccaccccatgcactttgcgagctgccccttcttcccccacatcagagagaaatgcccccacaccagagccccaagggtagggctgccgatcagagctgtgagttaacacaacagggtcct

SEQ ID NO: 400 - DNA, 1011 bp, Homo sapiens
agctgtgagttaacacaacagggtcctggccaccccccttgccataccccgccctctgtgcccctttggcaccccccaaccctagtatgtcctctgctttctgccactcgtgcccgctgagttccatctacctctcatgctggatgccagctggcccctcaccagcctgccctgctgcccacacagctcccctttaagtgcccagccctaggggcctctccccatccacctcctccttccacaccttggcacccacccaggaaaaaactgtggctccaactcctaccctccttatatcctgcagtattagctagaaaccggatgctgctgcattggttgggtcgggggtaggagggctgtgcgtgagcgtctcccagaaccctccacccctttagcactctgtttccctgtttcccatctgtcttctgggctctctctaacctctgccctcctccccagctcctactcactgcactaactctgggcgggcaggtaccagaatgggggtgtttagataagtgacacttagttggggccccaggggaggggtggtcggtgctcctttttctttaaagctcttttggccagctgcccctctgccccgggaccccttcccctcttcttttctctaattcagggactttggcttgagcccctctcgccctcctggtgagggtgctctgttggtctgcacttgggtgagctgtcctcctccccctccctgtggctgccgcccactcctcaggggagagagggagagaggaggtggtcctcccatgggagcaggaggtggggtgggacagagcagaccagagggtgctgggctcagggctgcatgtcggcagggatggatgggtggacacagatgcccccggaagccatggggattggggcagggggtggggggaggggtgccagggcttcctgcgctttgcactattggggcaaaaatgtcttaagcagtggggaacctgccaccccaccctgaccctcagcctgccacagccccct

SEQ ID NO: 401 - DNA, 1083 bp, Homo sapiens
ggacatgggaaggcaatgctatgctgcccgtcagggcactgtccttccccaatcgttcaggtgttccaacaggggtggagggcctggaggagcacccgctgtcacctgtgcatgtgcctgtcccaccctgctggggcctcgggctgcccgcgctgtctttgtctctatcctctctctctctcctggagtactgaatcctgtattactccagtcccatgggtaggccctcttgtaccttcctaccacgcctgggggcccagtggaattcctgacctgtctgctgtcttccccatccctccatccccaccccaacccctccatccccattctcagccatggacacggcagagaaaaggccttgaagagccttagcctcttataggcacttgggactcccccaccctccccaatcatatgagctgtgatcccatcctccccggacccctcccttccccctcggtgatgtggggtgtatgtgtgcgttcctctgcgtgaatgtgtgagtgagtacacatggtaggggaggagccagggcgactcaggagtgccacgcacctgctctagagcggcagctgtcccagtccctgctgtggaagtgggggacagggccctctcctgggggccattggtgctaatgagggggatggccttgatgtgggtgctcagcatgcctcccccagtattggcccggggcactagggcaggcagggtggagcagcaggtgcagtatcggtgggaggacgggttgctgggaataggacgagggggccaggccaggacaaggggttgccagagccatgaccactaccccgcccccaccacccgcctctccatctcagtattgcccctcccatcactcataacacacatacctcatccagcctcctccctgctcagacttggggagggtgggggaggagcccctaccccttctcctggtggcgggtctgcagggctgggagagggcagggcgttgtgagagagagaccgtccataaggaggacagtaactcctgccctgggaactcctgggcgggggggagggggacactgcccagaggcgctactgaatgtatgagaagct

SEQ ID NO: 402 - DNA, 1165 bp, Homo sapiens
tactgaatgtatgagaagctggtgctgggctggggggaggggggttgtggccagaaacagggaaggaggtaggtctcttccccagggaggggtgggaccggcaggggtgacttgaggggctcctactcctgccccacgttgacaatcagtatgtctgttatgtgcgatttttcaccccgttgtgttttgggtcaggattttaaagaaagatatttttatggtaattgttgctcgtctattttactatatatttatgtaataaatatatgatgaaaataacccccttgggcaccccccttagacttgtgtgctgtttccctatatcctcccatctgctggcagagtacccaccccacaaactgaccagatggagaggtggccccccccagccttggcagtatttccaccccaccccccaaacgagcacacaccacagaagccagctcagctgtgaactattggatttgagacaggaacagaacaaatcagagggccaggggagggttgtgggggagacagagtggtttaaataggggaggaggggaagttcggtgatgggggagggaggcaggtatttacaagaaggctcagggggccagaggctcatcttggaatattttataacaatataaataagattctggtttgcttttccttttcgtctcgtaaaggagagagaagtgcagagttcgattctgtacaagggggcagcggcagaaggccggccgggcgggtcactgggcgtccacccggaaggacagcagcttctcggaatgcatgttgttcagggtccgcaggtccggcagcttgagcagcagcttggtgaagcgggaagtctccaagggccggttcttcagcaccagagcccgaagagcccgcagcagcgtctcctggagctgctccaccgaagcggaattctccatgcccgagcggtctgtggggaagacgacagcagtgaggcggactccccgagctcctctgaggaggaaccggaggtctgcgaggacctggcaggcaatgcagcctctccctgaagccccccagaaggccgatggggaaggagaaggagtgccataccttctcccaggcctctgccccaagagcaggaggtgcctgaaagctgggagcgtgggctcagcagggctggtcacctcccatcccgtaa

SEQ ID NO: 403 - DNA, 408 bp, Homo sapiens
tgaactgcgtctgcctcctcccccgggtcaggcgagagcctgacctacctgcagagacaagcaccaccgcggtgaagaggcccagctcctcctcggtaagcgccagggagttgagcttctcgctgaagtcgaacatggcactgagcaggtctcccatgcccatggcaccaagctcctgcaggctgtaggtggtgcggcttaggaacatcactgtctggtccttcacgttgaacaacgaagcaaagcgcaccatcagcacctaggagggaaggggaacagtcatcctgggtgtggtgggaggagcactgaccaaatcgcccctgtagtttgccagagggtttagcggtgctgccttcgatttctcagtagagtgggggttgtttctgaatggccaatgagggagcccag

SEQ ID NO: 404 - DNA, 1135 bp, Homo sapiens
ccagaagcataaacggtcactcacctcaaaggtgccagccttaagcagggtgacttggtcatgctgagaaaggtcacggaagcccgggatgtgtttggcaaactctaccacctcccgcacagcgggcgtgaagctcatggagaaatcctcccagatctcctgcaccgttcgcccactgcgtccatgcgggtacatgttcataggacatgcctgggggaggaaaagattgaaggaggggagtgtcagccaggctgggtcagatggacgccccgagcagagctggaccccagattctgcctgggctaggggctgtggccctgaaggatgggtctttcagataaagtagcaattaggtgccaggtggagattagggattcccaggcagagtccagactgcaaggcaagacattttctcctgggaagatgctatccccacactcagcctccaggaacccccagctgccctacactaagtccattctgccaggcccccccaatcttcttaacgcactcgcccgcccccatgcccttaccagcagaacattctttgagttgccctgccggggactgttggcaggtgccttgccttctggggctgcatacacgtgggtggggcatagacggtgcccgttgctgttggactggtggcagctgtggtgtgcagggccaggaggccaggtgggagggtaggaggagggagcctggcgcagaccatttagggcctcgttatgacgctgggcagccaaggtgttgttgtcattgggggcaggtgggcagccctgattttcccagcgatgtggggtggtggctggagggctacctgatgcatggttggcattgaagttgccaggtgagctgcccagcttgtcatgggcgtaggtgaagatctctcgatgggcccgggccacctgggatatcacatcctccactgtgggctcagggcttggggatctgggaggcgtcagctgttgtggaaactgggagaagcccaccaggggtgaggggaccggagcagggggtggcgaggggcccatggggcctggggtggggtgctgggtgggtgaagtctccagcgggcactggctgctcaactggttgttggccaggttcatggcactctgcatctcagcaagca

SEQ ID NO: 405 - DNA, 1131 bp, Homo sapiens
atggcactctgcatctcagcaagcatccgctgcttctctcgtttggggatgcgcccaaaacgcacagctgcaacaggatgagaacagcatcaggaagttctcaaccatgctcacgtgcttctcttccttccttcctcctgaaagggcaaggccctgaaggcttggggtttcacatcaaaactaaaaccagcaagtccccacccatcaagggggtttccctaggagggattgctggtaggaggtgacccgagggaccaatgggatagaagtatatgttgacccaagcaaatgaaggatggacatcccctggcacatgtgattcacagtatgatgtgtctccatttgtgacttttttaaagggaaggattaattcagaaactttgggcggaagaaggggggaggatgtggggatgctgcctcaccgtctcgagacatgcccacagagagacacttcttgaagcgacattgctggcagcggttgcgattgatgcggacgatggagcaattctcattcttcagacaccttttgtactggatgttctgctggatgctccgacggaaaaagccctggagggcaggggtggttagtgaccacctccatcatggctgggcctctgtgtccagggggagggggccacctgcccctgcccttacccccagtccgcctcaccttgcagccctcgcaggcgtgcacaccgtagtggaagcccgaggcaacgtccccacacactttacacagtaacaccatgccattcagctctgtggaagagacgggcagcaggtgagcaggagaggccaggctgagtggccacaggtgtggaggctttctgggccggagatccagggagggaaaagctaaggaggaactccagtgttgaggggcactggagtgacaaaactgggctgaagaggggctggtgccactctaggagaaatccctgaagccagaataggtcctggcaagactggtgtcacgtaaaaacccattcccaatctggccctggcctgcttcccttcccccgaatcagctggaaaggtactcactggtgatgttgctggtgctcttgctgggggacactcggctgctgtcctccatggccacttgtagactcccaggggggctcccattat

SEQ ID NO: 406 - DNA, 1369 bp, Homo sapiens
ccgtcatcactcaggctgggtggaatgctcccaaaggagcgagccgggtcttgggtgagggagccagtgggggatggtgggaagtaggtgggacagccttgggtcagggactggaagctgccattggagttgtcactatagagggattcagggctggtgcggcttggggaggagccactggagccaatgtaggtgatgacgccacctggagagagaacaaaaggaaagggggtgtcagccgccatgtctccggacctagggtgccactgtgctcatccccacctgtctgcccaaaacattgctggccactcagttcaccatgtggagcccctaatcttggagttaataagcaattccccaacacacagtagacatggcatggccaagcaacacctacgaccctttgcaggccaccttcagcttctgctttcagtatgaggcatgacccctgtggcatctcgcatatgtgccccccttccttagttgccttccttgggaatatcgactgcagctaatgacttagttgtcagttgaagatctggggatgggatgggcagctgagcaccattcaaagtgcccagtcctccaaaaacaaaaacccagctgctgattttaacactaagaccattccaggaatgagaccatggaccatggagagataggtagccaacagtaaagagaatggagggtttacaaaagtaagacagtcacattccccccagttggggacatatattctctgaaggaaatgaagggaaggaatctgcccagcctggttcccctggcctcttaagagagtgagccacagtggagtctatccctgtgtccaaaaaggacttcgaggtgcgagttgcaggaggtggaagtacaaactgtccagcctggggctctaaaattcccccttcagatctcagcctggtaacaatgaccttggctctctggccattcagggactttgaccctctggttacattgccaatgaggtggctgtgctcccgtggtattagcaggagaaaaaggtgacctgcctgccacacctccggcaagcacctagattggtctgccatgggcggggtgggagaagggaggatcccaggacacatgtgacctaacacatgccatgccactgtgtctgcagaggcacatgtcttgctcacccactgacacacactgaactgggcagggcggccctaaaatagctcaaggttggtcagggtgaacccagctccttggaaaatagttgcacaacagatcagctcccccggtttcagggctgaggtgggggatggaatcattagttggcagtaaatgaagttgacctagttcacccatcccccaaaaaggagtgagaccttcatgcagaggcttc

SEQ ID NO: 407 - DNA, 1381 bp, Homo sapiens
ggggtgcagttgctttggggagcccttagtaggcaaactgcagcttgtctggtggagatgggggtaagacaatgctcgcagaactaaggagagagaagcttggggaacaggaatttgtaatgtggggaagctgagtctaaatgcagtacggtgaagtaggtgcaaataagagtgaagtggaaaggagtgagaagggtggttaggggtgaggtctctttagggagtgtaaaacagaaggccatgaaaggtcaggaatggctccatgttactttgttttggtgatgggggagggggccgggcaggcggaccggaaaaggaggcaggcgggggcggtgagtcagcccagcttcacccagatctcggcggggcggggcagggcgggagctgggccctcagccggcctcacgtccctgctccacgtgtgcctctcgcacgtggctccccaacgaggaaccccggaactcgaggccccgccctcctcgcttcccgtcaatcgagagcagtcgccccgcctcctacccgcccttccccggccaccaggtcgtgggctggaccccgaacgatagcagggccaggacaacctaggggaggagagaagggaacacgcgttgccggggcgaccgggggggcggagctcattatgtaacgaggccgggaggcaacgaccaatggggtggcagccacggcttctgctgaatgaaaacaaacgcagcacgtgggcccggctctagagccatgtgagccctcccggcggccggagccctgtaggtgccctccctcgggccgggcaccacgctctggactcctcaagtgtcgctccctcctgtcactgaggattccccagtgagatccgaacgattctcccagcccctccttccctgaaccccatcgcgccactcttctcagattccctcgcgcctgcaggaactagaggagggggaagacaagaggggagggggtccgttttctgaggccaggcatactacagctgcaggtagtggacagatggggccgtttcggggcactgttccaaagctcccagtccccctaaattcttcgcttcaccacccgtacctcctctccatttcctcctgcccagggattcgaggctcaagggagctttgggactctgaggggtggtgatggggcgtttctgagagcatttccagcccgaacaagccgctctggaaatcccacactaaagcaccgcagcacgttagcaaatctccgggccgagggacaccccagtcccttacaaagttcctctttttataaggcgtagatggaggtggggagacagtgacagggaaaagatgatagtaaagaaatctcagtacctgtgttgttgttggagtccagggtcgtcatgtcttcaccagct

SEQ ID NO: 408 - DNA, 1391 bp, Homo sapiens
agggtcgtcatgtcttcaccagctgagagcggtcattcaaactggaccttgactcaaactagaggttgcgatcgccgctgttgccccctgggcactggctaagggcggggagtggaccccgcgactcacgatcaggatccgaagcaccctgcagcaaggtcttggggtggccggactgcagccctgcagaagggttggacgttgaggcaacggagttctgctttgcatgggaagagcagagagagtgtgtagggggaatcagcctgcagtagttctggctagaaggtagcaaggagggtcgggtctctgcagtgtacggggtgcctctgcctgccggctccgcagcgctgcggggtggcgaatctggagctcccggtgcaaaagtcccagaggaagagaggttgcaaccaggaagtaagtaggtgatggggagaaacggggcaccgagtcgcaaagaggcgagacgtgtgccctgctacgttccctcggcagtaatatttcactctgccaatctcagccgccttttgcccgagcctttccctgggacagagggctctgcgcaggcgccagcagcccagggttcccgggccgcacgcggcactggagcaggtaccatgtgatcccagggagcgcctcgtgccccagtgacacacttttccaacagccggcacgttgagctcttgcgcgcctgcgcaacgacaagactgtcgggatttgtagtccaccgacaaagtgggcggactgcgtgcctttcccctttctgcctggcaaagcgcttgccgggacctgggaggagctgagagtggggtggggtggggtgcgctgaagagtcagggtggcgtgtttagaaagcctgtatggcaggggcatgtgaatttctggggagggactggcaagcttgtttgctgtctgggagatcaaagctaagaggccctttctgcaaaccttgcaaacgtgagggcttcacgtgattgcaggactgacctcgtcctgaggttactggtgaccgggagagagagaagccggggagggagatttccctggagtcaggagcttaggctgccctctgcttcagggcaaagtccagagaaggaaaggaaatgtgaccccctttcccttctactcgccttagggagaacacctccaggggaaggagttcccacagaggtagggatgtctgtagggactccctgtttgcttgtatgacaccattccacccactccagttgactttggggtgagtcatttccctttgtctgggaaataaaaaggacaacagaggggaactaatagtgaaagtgctttgaggtcctaaagtaatggggaagaggtgaggcagggggtgggggcagagtgacacccctgcccctcggtgctggaggataaaatat

SEQ ID NO: 409 - DNA, 1160 bp, Homo sapiens
tatgagcacaggagtaaactgggtagtgaggacagtgaggttgactgcaggagcttgaccactcaccctctgactccttgtagaagatgagcttcctggaatgggctaggctttagctttgttctcctgctcccaagaaaagtgggagagagagggcagtgggctcttctctggccctttggcccagagttgggaagctgcagcagagtgtgggagcaactgggaggggctaaaacaaacaaggaaagaggcttttcaggaaaacttggttctcagcctccaccccctctccctccaccctctgggctctggagggaaagctaggaggtgaattgccctgtcctgcccttgcctgctctctgtgaccttgactccaagtcagagccagggccagagcccaggtgtctgtcagggctggactcaaaatcaggacccctggcgtgcatctagctccccacagcacagcaccaccactagcaccctccctttacttggccggggtcctccccaaggcccacagctctgtttgctgctgtggaggtcctacccaccccctgtatacttgctggatgtttgttcttctaggagtgggagctggggtgggtcaagactcctcgcctgctgcaatcagtgagaaggaggagggagcagaggtagagagagctgaaattcagtcagcctgactctcctcttggcaaaacctgggtggttctgcagtctgtgtgtggtgtgaaggcagaggctgggagggagggggcaaaggagaggggttacccccttgctccttccttccttcctttccatttcttatagggcccttccttttctccctcacaagtaattcgggtgtctttcttctacagctggtgagaggagtacagaatgaaaaggcagggttctctcttggccccagaagcttctagtcagtctgtgtaccctgctcctttctctgtcagcagctgctgggagaagggcagaaactctgagacccaaagccaccaaagggaggggggaaaggctgggttgtctggctctgggtgattcggagtagaatcttggtttctctttgacctcaaccttggctgtaagaccttaagacaacaggtgtatctcaacacaaccttcctcacctatccctccagctggacattgctgttcac

SEQ ID NO: 410 - DNA, 453 bp, Homo sapiens
gggtgggtccttgctggaaacaggtcaggcttctgtagatgccttcccatccccctcctttctcaccaagaaaccattgcccagagtagaaacctgtctgcccaggtgatgcaaacctggtatagaaatgctggggatgcccctgaatcagggaaccagccatgtgcctgggagagactcactccctgccctcctaaatccttttctttgtctctaaaaggccagctatctttcccaaccccacccaaagcctggatgttttggggagaactttaagaacatgccacaggaaggacagagtctgagctaacttgtttctcagtgtggtggggggagggggatggagaaagcaagggcgaggcatgagccagggctgggttccatggatgtgttttgcctcagattctatctttacctcactactgctttttccaaggaaaggaaaccataaat

SEQ ID NO: 411 - DNA, 1513 bp, Homo sapiens
gccagagggtctaggtgattagtcttgaagctgtaatttgcatagcacttaagactgagaagatgtccatcaaagaatgatagcgcggatggagattattggaggggctaaatctcccctctagctatctcttgaactaccactgtcagcgtcacaatgaaaatggcaatgctggggattcaaccccaggcgtgaagatgaaactctttctgctagcaagactgcccctcctagagagattactgccaccctaggggaacgtctgagcagcaaactcatcctggtgtttcccaagcaatggtgatgcttggaagtgggatatatcaccaagaacagaagcctgaagcaccccttgtccctgtcccagggagtacctcagctttccaaaatctctcttttaaccccaggcacatttcctcttcccctaaactcttcccactccccgtcctacatttccctcatctggttctaaaagtagaaggggcaggaacagggtgcacaaaccacagactgctatagaggtgactaacagaaacaggcgtctgaactctcttctctacccaaaccctctgaatttggggtctgctgctggtggtgaggagagtggggcaagtaggtcagggccctctgaagtcccatggtgcttcattccaggagctgtattaagaagattggttgagggagcgtgtggaaggccaccaaggaccaacaaaagttgtgtccaaagccttaaggaaacagcatcccacttccccatttacctgcttgagcaacgtgcacctctaaaaccagcccttccgaaagccactgtcctgggccaatgcttcttcagcagatgctttgaagaacctgaagaagggtcccctctctcagaacctaggatctcacccacatcacaggatcctggaggaggcatggattgtccttggcagtggagactaagccccagatgaccctttttctggcatccagtacatgctctgctaaggcctcctgtccaatctttgccatgctgctggagccacagtggtatcatcttccaggcccctgcacctgcccattggctgcccttgagcctctgtagaactcagatgcagggagaatgtgggggaggtggaggaaagggagagggggtgctctgcatctgcttccatctctaccctttatcccaagctccatctcaaaccctctccttatccagtgtctctccatcctttgggcctctgcagatcaccattagctgcctggggaggccagaggctcatgacagtcctcgtgagcagaatggacctcggaggagcggtggcctgggcaggcattaggggccttgtgtagcttctgggaggcttacataaacactggctgggatggggaggaaaggggggttgcaatggctgcccagggaaaaaagcaacccccgcccggccggctcagcctgagtggaaagaaggaacaaggcttactttccctcctctcactcctctcccctggtctgcagctgttagtcgggctg

SEQ ID NO: 412 - DNA, 1645 bp, Homo sapiens
tgcagctgttagtcgggctggaaagactgcggtatcttgggggagggggggcaggagaaggagagagagaggatgcgacttcacaaatttgggatccctcctcctcttctaaattggggggagggcgagtggggaagaagcagtttgccaaagagattttcaatgccgcaggaaggagctttggctcattagaatgcgcagtttgcaccctggaaaaaaaaaatctgtgctggttgcaaaaatgcagacgtgtgtaggggcccagcggagattaaaaaaaaaaaaaaaaagcgctagctctgcaatgcaggatctgcgaagttttggtgcgatgaggaaatgtgggtcgtgctcatttcatttgcttgttcctgctaacctactgtccccctgactctagcatagtctcatagcccagcaagaggcaccgcagcttagaaatggggtcacgagtagggggcagaagcagagagccagaagtgggggtctgtggttagagtgcccagagaaggaccaatggaggttagagggccaggcagatggaagggggcacttcaatgagggatggaggctgaatttgccttttgcacacgcatttgttctgcagctacacaggggttattgggaaagcccttctaggtttcctccagccctcggctcttccccatctccaagtagcagagggactttccccttccggtccactaacctcacagaccactgttgcagaacctttgcttcatgtccccaaacacacaaatccctgaactgtccttgttctaaccctggagggggcacttgctgcgtgtgtgtgtcatcctccttcctagaaagaggggacagggtagcctgatttggggagcccaggctacagggaagccaagtcttggctctgggcagacatcaacacatcaccatgagggctggggtgggctgttctgtgttcttggcttgggaaggtcctttgttcttttgaggcttagggttctgggttgtgaaaacaccaaggggctgcctgggaggaaaatatgcttggggagaccatgtttcttttctgggtgtttgctcccctggtggctcaggagagacaaaaggagacagaagcaggataaagcgcaaggagacaagaagggagccccgcgcgctttccctccttcctcatcttgcctcctgtttctctggcccacggaggaaggggcccagtgtgtttgtgccggctcgaggctcacgcgggctgccggggtcacatggcccgggcatgtgcagcctgctccatttctaccacaacaactcgctcataaacagcccggctgctgcggcggtggcggtggagacatgtgcaagcgagggggtggggcacgtggccctgcccgagccaagggaaggcgctcgctcagcactgcctccacccctccccagcactggcgctgcctcgtcacaggaaattcctagtgctcctgttgctgctgcaaaacatgttttggggaagtgactttcaataaggatggaatcaatggactatttaaaaagagacagaatggataatcagttagagaccgacttacgcctgcccttaccctctcttaagatctctgtactggttagggtggtaccagttccttcctcctatataaaattggaacca

SEQ ID NO: 413 - DNA, 1185 bp, Homo sapiens
tctgggggcatgtctaccttccccctttgtgctgcttcatctcaaagtccagccacagggcgtaatcagatttagtttgactcagagtaaaaagcatttattgagtgcctcctgtgtgcagattctggaaatgcgggcaaatggcacaacagtagtaggctaatgagtagctgagatctcaaagaggagtggaaggtactgggtgaggggagagtgaaagaaagaaaaggttagaattttatttgtttatcctttctccatcttacctacttttcttcctgtcccgaggctcctattagaacaaatgattgtggcttaaattgttttgaggctggaggtagaaattaagcccttatctatttttgctggccatggggaccccaagttagttaacagccataggctcttgacttcccatgagtaactaaaagaagatgaggaccatgcacacaggcacacacaaacactccctgcgatctcagatgctagggtagggagaccaagagaaggaatgaagtcccagaaggttggaagttccctgggtaaaatgagtttagcagataacaagcaggaaaagtctttcaataggggagggcggggtcatccctggcctactccaccttcctgagacccagaaactgtggccagaggaaacaaagggtccctaaggcaaatcacaaaagctcctgagaatgaaacctgagcctggaaagagagtagagaatgagggatggacaccagatccaaagggttcccttacacaggcaaatgggggttagggggttgggagggatgtgagccatgcccagcccctctccttgggccttctctccatcacaggcagttctcaggagcagaactcctgttactgtctcagtctgagcagctgactcctggcctctccctgcttcattttttgaggaataagcttttctctgattctcacagagccctttcttttgcttctctgcaaggctttctctctgtgcctgaaaggctctgggctcaaggagcagacagccctgcaggctcaactgcagtgacctacattggctctcccctaggccctgggtgcgggggctgagatttcaagataggaacctgggaatctggcacaggtctacagatgatgacatcaggcagacaggctgcaaaagtggcattgagggactggaccctgaggca

SEQ ID NO: 414 - DNA, 1169 bp, Homo sapiens
ggactggaccctgaggcaggggatgccataggactatgttctcactttgtcatttgagggctttttatggacaagagatcagaagagatcaaatgcaaaaacacctgagcagtgaccccttggagaggagccagtggtccctgacaggcccagtctctattaatgagatttgggagtggtttctgcctgctccctgttcttgctgaacctacactggtctgctgcaggggactggaaagatgatgtggaagaatgagttcggatttcagctgatttatttcagggaaacgaaggctgggtaaaagtcagatatgcagaaatccacgtactcccaggcttaactataatatagagaccctgtatttctttagactcaatggttctgagaaggatccagaaggagccctcaagattaattaccatttacaaagtccttacctcaggaccctggcaactgaatccctccttccagctaccagccttctggaacagagaaggcagcttctgaaataggtgctttccctctctcccactataagccacagtgtttaggatgaccactgcttccagattgtgtgatttgccctggcaaggaaatcctattgtggggggaggaaatgaggcagtcgtgacacaaagtgatggatgagccttttgcttagcagagagagagagaaagccggcaggctgtgcagaactgagtggctcttgggtccaaagggcttccccttggccaagtcccaccccaaagcccaggaagtccacagcttggcgcccagtcaaggcaaaaacattcctcaggactctgacaggctgggggatggttcccaccacgaggatgggggaggggaaggaaacacgcgggggaggaaatgaccacaaagaagggggtgagggtaagaggtggggagtgagttctcagtgccctgagtcccttttagagagaaaggttgaggctggactcattggcttgtgaaggacttgcagcttcagagcacatgacttctgggtcacccttctgctcagggtcatccctgatgacccaaggtgtcctctggaggcttgttaactcaatctccctccttacgcaggggctgtggttgagcttgggagcccctgagtggctaaaagctggaattgcagttgtgctgggggaggagcccatcggg

SEQ ID NO: 415 - DNA, 380 bp, Homo sapiens
tacacacacggaaaaataggtgccccaggactacttccattgtcttccataaattactgtttaacatgcccctgggtagtgtgcttcctggctactgagatccccctcctagggctccccggcttgtagcttctggaccattcactgtccatgacccctatgaccttggagggagaaatggccccacaataattctgattttaaatttacccctccctacctgcactacttagtcctagttttcctcctctgagccttgcccacaactccttccccaagtcagcctccaaccttgaatgttccctcacccccagttccctacccaatcccccaatcccacatctcctgtaggggataggagtgaggtgaaaaatggacaa

SEQ ID NO: 416 - DNA, 1805 bp, Homo sapiens
cttagtggtccacctgggaactctatggaggaaactgcctttgagattgtaccccccaccccaagcccatttggaagggagggtcattcctggcggggagaagccatgaagcaggcagggtgaatgtgagctggggcccaggagggcaggagagggcactgctgcaggggagagcaggcaagcaaaagcgaggaccaggcaggggtcaaggctggggccttttggagctgccagtgtggtcctcagatggctaccccaagctggttcttggcaagtggcaccctggcatggagacccagcccctgcctctcctcccactgcttccccctccctgcatacccacactgaatttgcatgaatgccacctcctctggggagcctccccagattgaaccctggtggagcacctaccacttcctattgacatgtacatctgtggttctgtgccccctcctaccccagcccactgtgtgcccagcaccagcacatagcttgcgcctgacacacagaaaggactctggaaaccaggaaggaggtgggcagagaggcagaaaagctatgaacattcagacctgagatgactgggccctatagcaggtagagagggagcagagaggaagggctgcgggcttcccaggggcccaaggacagagaattggcaaagatatgtcttaaacatctagcctgggagagcatgaatggagccaattcctgagcacttactaccggccaggtgctaggcctgggtcttggcacaaccataacgccaatgacaggggctggaagtacagcagtaacaccaagagtatctggaaacccagcagccaggttctggggagcccaccatcctgtcattatcacaccctccagggtgaggccggcagataaagagtttggcccctgtgcccccaccgttcccatccccacccatgtcaggctcccagctcaggcctcgaggtcaagtcctgcctatccaggctggaaggagttgaacagagagggcctcagctgcaggctggacatccctggaggcagccaggcggcagacccggaccagtggaccctagggctgcaggagaccaggccctgactcctgtgcagaggggaagggtgggccacccgcagcccagcatgcacagagctccctgggaggccaagtggcctacgcctgtcaccttcacctctgcatctcaggggcccacaggaagtgcctgcttggcctcagtttaaagcagaggaaaccatggggtgagaggggaggagggaggtagtggagagggaagctgggtttcctgtcatatgacccctcctctgggctccctcaccaccctgcctggcttggcaggagtcgtctgagaaggggactcctccagggacttggtccctaggtccccaggtgagctggatgtccagtggagggagaatgcagagggtgaggggctgtgggggccagctagagccctgcaagggtagcagtgggtccctgctcctgtccccacggctggggctgtagccacaggtcctcatcaggggctcgcggggtacctgggactggaggctggaccacaagaaggaagacagaagggggtcccccgacatccagagtcagatgtggcagatgccgagtcccaggaactgtggggtttgggacacaggctcttccggaagggcaaactgccacgtggagaagagagggaattgtctctccttggggtgacggtgggcccaggcacaggtggatgcggggtgcagcaggtcttggctttctttgcctgtgccggtccagactttctgtgccctttgga

SEQ ID NO: 417 - DNA, 1828 bp, Homo sapiens
cggaggtggcagagcggcagacccgggcaagtgaaccctagggctgcaggagcccaggccccgacgccggcgcagaggggacggaagggcccgcccccagcccagcgtgcacagaggccatagccaaggccttaaggctcatccaaccggggactcatatcccccccaccggcagcccggcgccccagcctctacccgtgcccgccgagatgctgctgccgcggtcggtgtcatcggagcgggcccctggggtgccggagccggaggagctgtgggaggcagagatggagcggctgcgcggctctgggacgcccgtgcgcgggctgccctatgccatgatggacaagcgcctcatctggtgggtgccacgcgggcgccagacggtgcgtggggggggtgctgcgaggctgccccgtcggatggtgtgggagcaccccgtctgcttggcccgggtgggcagggcgggtgactcaggggcgcccctgtcaccacccccgtccaggcagctgcgggagcccgcgggggtgcagaccttgcgctggcagcggtggcagcgccggcggcagacggtggaaaggcgcctgcgggaggcagcgcagcggctggcccggggccttgggctctgggagggggcgctctacgagatcgggggtaggacccgcgcgacccgcacctccccttgccctctctggagccccactgcccagatcggaaaaaggagagtggcatcatcccacctgccttcacccgggtcccccgaccaatcggcccctcccccctcccaccccttccgcccgcaggcaccgcaaacctcgggcccacgcagcacccccaggtgactgtcagcggtacctccggactcgggcgggtgggagcctggcgggcaccccacgccgtccggtgggcccgcccttggactctcagcgcggccccagccccggccccggcctccctgacccaccctgctctcccactgcaggcctcttcggcacaggaattcggtcctacttcaccttcctccgcttcctgctgctactcaacctgctgagcctgctgctcaccgcaagcttcgtgctgctgcccctggtctggctccgcccccctgacccaggccccaccctgaacttgagtgagtgtgaggcccaccaggggaagtgctccggtgcccacctgcgccatgggggggctggcccagggcccagagcgtggcgacaacgctgggcgtggtcctgccgtgcaggccccggggctctctctccctgacctcgccttgtgtggggcacgcctttggcacatcctcagccccctgcccaggcctccccagggttgggggttatagagcagtagccgcagagcctcacctatgccttggggatccctctctattgacccccttcctcctcaacagccctccagtgccctggtagccgccagtccccgcctggcgttttgaggttccacaatcaactttggcatgttttgactggcagggtgagtgaggtctgtcccggctatggtccagagtctgggagacccagggaactggcttcaggggacacaagtctaagaggacctctgctcctccagggacatttcggctcctcaggggatggtcttacctagacagactggcctggccggtggtggggttagagagaggctgaggccactgtgcccaacatagactcatggacacatgcccgtggtcctcagagcccagctggtgtaggcggtgccagggacaaagggggaaaagtgccccggcctctgggagaagcacttccccaccctcatcctgggaagccatcgagtggtcaccaatggggtt

SEQ ID NO: 418 - DNA, 784 bp, Homo sapiens
tcacccgggctgggtatcttcgtcgctgtccccaggccttcaccaacacctatctcttctacggtgcgtaccgagtggggccggagagcagctccgtgtacagcatccgcctggcctacctcctcagcccgctggcctgcctgctcctctgcttctgtgggactctgcggcggtgagagcgaggtccacaccttcaccccttccccagggaatcttccctgatcaccccttccttggcagggtaccctcccattggcaggaaggcccatggcccggcacagcaggctcctgggtgcttcctcagcccaggctctggccgcaaaccttaggaacagggccaccgccccctaccccgactcctcactcaccaggacctgcacctggggctgcaggggccttcccagacccagagccgagccaaggctgaggctggatggtagaggtgcccctcctccagcagcccctggtctcctgccccgcaggatggtgaaggggctgccgcagaagactctgctgggtcagggctatcaggcgcctctcagcgccaaggtcttctcctcatgggacttctgcatccgggtgcaggaagcagccaccatcaagaagcatgagatcagcaacgagttcaaggtgtgtgcacgagtgagtgcctgagatccacaagctccaggtatatgggagcgagtgcgtgagagccacgtgttccaggtgtgtgcgagcaagtgcgaccgtgccagtgtgtgtgagcgtgtgtgggagggagcctgtgggagcgtgatggaga

SEQ ID NO: 419 - DNA, 648 bp, Homo sapiens
ggccaaggcaggcgggctcccactggatattcccgccaactgccaggctgctgcagggaatagcttacaggcgaccctattctgggcctgccccagagttacactttagggcactgtggggggcggggagcagacaggggccccccagcacgcgggctcccctgacctgccttttcccgcaggagtccctgtttctgctgctccagtacctgccccctggggtcatcgccctggtcaacttcctgggtcccctgctgttcacatttctggtccagctggagaactaccctcccaacacggaggtcaacctcactctgatctggtgagtgccacccttggtggggacaagtgggcatgtaacaagtctgcatcctgctgctctcttttggttgtcacctggcacctggggtccccagctgagaggcttcccccttcactagtggcccaagggaaggcaggtacacacctcacagcacacgacctcagggccccaggtctaaggctttccaatcccccacctccaaaggaagccgccagtctggaccaagctccggccattcagtggagcaagggactgtggccaggggtgctgggaatgggctttgcacacaggaaaaccagcaacacgggacatgcagagcttctaca

SEQ ID NO: 420 - DNA, 1213 bp, Homo sapiens
ccctttttcccatgaatcgcctggagactcggactctgagaacgcactttggaccacattgccacagacagagcaggttggaaggaggctgggcccaggacacaacatgatcccactcggacatcagccacacctatagcctgggtagagcccggtgcccatgtgcctgggcccctccacctgacaaggtccctgcccccaggtgcgtggtgctgaagctggccagcttggggatgttctccgtctccctgggtcagaccatactgtgcattggcagagacaagagcagctgtgagtcctacggctacaacgtttgtgactatcaggtggctggcagcccggcggggcctgtccctcccttccttctccccaaaaagctcacctcaaactgtgcagagccctgttcctgcccctttagtcacctttgagagaagctgtgagcagggctgcctgcaccgccgcacacctccagggggcgccactgctgccacatggtgtagtgtggctgccctggctgtggggcttcctgctctaatcccatcctcaaggcctgggtttcaacctaacgattctatcagacaccaggcaaggcacctgcaccacagaaaccctcacaggaggctaagggaaggaagggccggggtggccgtgagtggtgacgggtccccttcccctgcaccccagtgctgggagaactccgtgggggaggagctgtacaagctgagtatcttcaacttcctcctcaccgtggccttcgccttcctggtcaccctgcctcggaggtgagccccggggtgacacctccagaagggcgggggtgccgcgagcatgttgggggtggccagtggctacagccaagggtgagcgggtccagtgtggagcccgggagtaagtggcaggctgtggccatgaccaatacagcccacgcatctgtctggagtggtgagtacctggaccctcccatccctgcaggctgctggtggaccggttctcaggccggttctgggcctggctggaacgggaggagttcctggtccccaagaatgtgctggacatcgtggcggggcagacggtcacctggatgggcctcttctactgccccctgctgcccctgctgaatagcgtcttcctcttcctcaccttctacatcaagaaggtgacggctcatggctggggggtatggggttcgtgcctctgggtggatgccttgagc

SEQ ID NO: 421 - DNA, 1242 bp, Homo sapiens
ctgggtggatgccttgagctgggctcgcctcctgctcctgctcctgcccccttccctgggtgtcagccccctggggtctgcataactcgctgactcctggttgctattgcttgcgcccccagtacaccctcctgaagaactccagggcatcttcgcggcccttccgtgcctccagctccaccttcttcttccagctagtgctcctcctgggcctgcttctggctgcagtgcccctgggctatgtggtcagcaggtgaggggaagaggaggggggcacccagaggctggcaggggcagtttctcacccaggaccctgatgccagccccacttggccatctctcgccagcatccactcctcctgggactgcggcctcttcaccaactactcagcaccctggcaagtggtcccggagctggtggcccttgggctcccgcccattggccagcgtgccctccactacctgggctcccacgccttcagcttccccctcctcatcatgctcaggttctcagggcagccggggccatgggaggggacacctggagggggaggtccttccttccatgggggtggtgagcctgtgcacccccaaccaggagccagacgcagaaagccaagggaagcaggggcctctgaaaagcaggaacctcctgggcccaccctctgggctgccatggggattgcaggatcactggggaagcaccgtgtctgggtggctgcagctgctgagctattggtattgctgtgccagaggggaggggatgaggggctctgcgaggaaggagaggagggtcccatcctcagatacagcagtgtgcagtgagaagaccccagtaccgcgtattgtagagattgaggtggggagagaggaagtcagggagaggcgcctgtggccccaggggcaactgaccacgaatccccttcccacccaagccttgtcctgacggtgtgcgtctcccagacccaggccaatgccagggccatccacaggctccggaagcagctggtgtgggtgagtgtcctcggggctggtgaggggacagcagcttcagtggaaacccttccctatgtgtggccgagggcctagaacacgtctgagcgggtcaggtgggttcttcccactggagggcgtggcctcaggctgagagtgaagacggggaaggggaggaagagaacagctcgggctcctgagaccaggagccagacctggtaagtacatgaccttaggggctgggccttt

SEQ ID NO: 422 - DNA, 937 bp, Homo sapiens
ttacgactttaggcttggggccaggggcttaatggagctgagggaggaacagtgacctggctaaggcgtggcctcagggtggggcctctaccgggggcgtggccttgggctgcttggggacggactcttagcgggcgtggtctagatctgcatggggtgggaccctagtggggcgtggtctcagggtgcgttgggggcggggcccttggaggtcgtggtctcgggcggggacgtggaaggagtggcatctggctgcgttgtggacgggactcctgagggcgtggtctagggctgcatcggggcgggaccctggtggggcgtggccctgggagggtgtggcctcgagcggggcgtggcctcgggcggggcgtggcctctggctactttgggtgcgggctggcccatgggccgcagagttgctgccgctgctgtcctcacacccgctcgtgggaagcagcgcctgtcgcaactcgccacttgttctcctcacagcaggttcaggagaagtggcacctggtggaggacctgtcgcgactgctgccggagccaggcccgagcgactctccgggccccaagtaccctgcctcccaagcttcgcgcccgcagtccttctgccccggatgcccatgccctggctccccgggccaccaggccccgcggccgggcccctccgtcgtggatgccgcgggactgcgttccccttgccctggacagcacggtgccccggcctccgcccgcagattccgcttccccagcggcgcggagctgtaacccctacccctgcctccccgaagcctccctggggccccttcaggcctccttactccatcttccagacccctggcgaccaccgcccctctcagtggctccagggcctccctcagaggtccccaaagatggacacacaaccccagcggcagcaggaaaaacatatggg

SEQ ID NO: 423 - DNA, 466 bp, Homo sapiens
acactgccccagtgtggggcttagtggcggctcctggccctgactgaggggctgactgaagcctggtgagagcgtgctgggtcagcctctccctggcgggaatcctctccgtccagtcttctaacctagcagcctcacgtccacagagctgccttgtgaaactcagcagagccctggcttcctgcagagccgtgttctcccagcctgcttcatggctccctggttgagccaagcttgcggatccgtggggtgaaggtacccgcaccgcctgggccttagtggtatgtacgggcctgcatcgtgagcagcgggcgggggcccaggcaggtgaggcagctggccacaagggcagggcccggcccccctcccaaggctgtgtctgatattcttgagcctgttcgagtttccttttccaagcctcctgttctcccacccccacccctgccatgctgcagtgactaaatct

SEQ ID NO: 424 - DNA, 1139 bp, Homo sapiens
catacagtgacttttgaagtgtccccatggggacctagaagtgcagtggcggctcctattacaatgtggtcactggcctgaaggagccaaatgggagatgatggggagtggacctggggccccctgtgatcaggaccacccaggaagacagcccagggggcctcgagcgatgggcttcttcccacaggagggctcttggagccagtgacaggcaggaccttggagaaagggaggctttggacaggagctgagggcagagagggggcctgagcaaagatgtggtaaaggggccacggtggaggctgggaagctggaaatctgaggcctctagactgggatgcagggcacacggggccagtgcgaagacggaaccggtgctctggcagcgggtgccgtgggctaggatgactttctgtagatgacggagctgggggccatgacctaacaaggggctctgccaggagcttagaagtcctgccgggcagggagggactctctggggcttattgcaatagatgcagtaaaggtctcaccaggtgggagagcccacctaggtggggtgtcccagccacccccagccttggggactcctgggccctcccctgcccagccctgagagactgccctgtctttctgtgcccctgcaaccccgctatcctggccagggcagcccagagcagagtcccacccgcaggacctttctggggacacagtatgggggaggaaacgcggagacgctgggaagagcatttgttacagaggacagtggcctctgcgagcaaaaatcacagaacatcagcctgaagcgggtggctagagagcttttgggggcccccaaactccacacagggtgacctgggggtgaccttggaggcgtggctgctgtgtcctggcttactctgcagtctggacagaggggcagcgcagcccagagaactggtcagccagaccggtgcacaagtgattcctgggggcggaggggtgcaggagagatgtttgggtcccccaaggcctggggaaaatggcccatgagtctgccttcgctctctgaccccagcttccccacagactgggaagaggaagagctcctcatgagctgccttaactcaaggttcccctgaacaccaccacgtggagaa

SEQ ID NO: 425 - DNA, 1224 bp, Homo sapiens
aaagagtgagtttccctggcctccaggcaagaggctgccagcagcccagggcctgggcagccagccagctccccagtgacctctggctcccttcagtcttcagttcccttccccacccgccttcagcagaagtgagaacagactttgggaagggaagggagttttactaagaaactaagagaaaatgctcttgctccccagctgggagaaaccgaaaacagagaggccggtgggtgcacaggaggcagcctccatccccgggaccatgggtagcaaggtgcagaaacggactcatgccagctgggagagggggccaccgaggggtcaacagagccagtctgcagtgacctccaggacacctgcacctgcctccccaccatccttctggccactccctggtcagcagggccactccctcagaccagcttcccaacacacccaggcctccggtgcagcaagtgcctgggaaaggctgagaggagagctgggccggggctgtgagtggcctcccttggtcaggtgttcactcctggacggtgcccaggggcagagagtgtgattgaccggtcaggagccacaggtggcagcagctcccacaggaggcaatggtcacctggtggcaggggacatattcctgaaggaggcagccagaaaaggcattccccacacaaagtgtgggaaactgagccgggccagaaagtgacaggctggtccagcagccccaggctgagcttgggcacaaagccgggtgcagtggcccacagcggagctggcagggccccagcctcaatcccttgcgcccttacatctctctgtgttccggggaatgcctggccccagccctggcctcggggctctgggaggccctgctcacccccaccctccctgcatgtgcaggaggctctgtggctgaactctgcacacacactgcctgcgatgcagctgggtctgctgctggccaaggccagcactggggccagttccctggggaatgaccatccatgtgacctcccaccaccctcagtggggcctgagggacttctgaagggcggtgcttgggcacaccacgctccgggacccaggactccaggacccatcacactccaggaccaggggcctcgtcggtctggggtttcattctggggctgggtgcagccttggcctcccggctgtgaaccatcatgggtggggctgccttttctcagcccagcaggtccccagctg

SEQ ID NO: 426 - DNA, 471 bp, Homo sapiens
ggagcatggacaccttctgcccaccacgtgagcccgggatcctgcggctcagaggtgactgctgagtctaagccctggtctggcttcaaggtccaaactccttccacttctctggggattgagggggagtttgctgtaccgggcctgccggggctctctgggccccgccctggtagctgaggccctggggtgctgcggcctccaggttatctccccactgcaggcacccacccagggagcatcccaggggcctcagggtgggggaggccaggaactaggaggttctcactgcccgagcagaggccctacacccaccgaggcatggggctccctgggctgttctgcttggccgtgctgggtgagtccaccagggacgtgatggtggggctgctgctggggccttgaggtcttgggctcaggtgggggtactgggagcacaggagagatgaggcctgaaggaagggcacctct

SEQ ID NO: 427 - DNA, 890 bp, Homo sapiens
gcagggccctaggagtgatggagatgggcaggccaagcaggccagtgtggggacctccggggcacacaggcagggaagttgctcagcttccagcctttggctgggctgtttggagggaagattccctgggcaggtgcatcctcatcactctgccccaggtccctgatcgggagcagaagccccccctgagaccctcacagctctgcccggtgggcgaggccccgtggagggctggggaattctggtggggcctgggaggttgggattctctgaccaggaggagggccgtgagaggatggtgaagttaaggctcccccaggggcctgacatacacgaggctgccttccttatagaggcaggtggggagtggagagtgtctgggacccagctgggtacaggaccagggaggaggggacgctggggaaggtccctgacagcccctagcctggcctgcttcctcatctttgcctgctccatctttctgcctgcactttcttgccccatccttccctcccctcccctcatgtccattaaggtgaggatggacagtcacctccctatattgtcccaactaacccttgccccttgttgctaggccatcaggttacagagcagggccttccccctctattttgctaaagggcaggtacagggtaatgatgacgccattctcacttgaatgaggcccaggttgaaccattatttcctcatttgctttaaaaacggatacattgttggtgtggctgctaaaaagagagcaggcagctggggctccgggaagtacctgtgcagggcagttccgcctccccctcttggctggctcccgacttctctgattcttgccaaccaagtcctgctaactaaactcctaagagactgactgataaatc

SEQ ID NO: 428 - DNA, 483 bp, Homo sapiens
aaagcacattctaaggtatgttagttagaatgttctagagaaaagcaagcagggtagaaggaaagggaacaccaggtaggtaggggaaggagggcagcatttgcaggggagggtggagtttgggaaggggccgtgcagcaaggacccgaaggagccgaccgagcaggaagtacctgggcagggaccctgtgtggccagaacacaggaagcaaggggcaaagggtattgaatgaggtcagaggcatggtgtggggttggccggggagggccctgtggggcgcagccataggaggtttggaggggaaaacgcaatctgatttacccttggccgaggtcatttggacactgtgtggatggagatcaaaggcaaaatccaagagagccattaggctactcgggatccagaggagagactgggcaatgcgggagaggcagggagatggggtggacatacattctggaggccagcagcagctgctggca

SEQ ID NO: 429 - DNA, 474 bp, Homo sapiens
atggctttgtggtactcaaaggccggccacgtaagatcgtcgagatgtctacttcgatgactggcaagcacggccatgccaaggtccacctggttggtactgacatctttactgggaagaaatatggagatatctgcctgtcaactcataacatggatgtccccagcatcaaaaggaatgacttccagctgattggcatccaggatgggcacctatcactgctccaggacagcatggaggtgcgagaggactttcgtctgcatgagggagaccttggcaaagagactgagcagaagtacagctgtggagaagagatcctgatcatggtgctgtctgccatgaccgaggaggcagctgctgcaatcaaggctcccagggtggcggtggtggcagcagtgatcctcccaagaggccccctcccccaggctggcttggctctgccctggtcctaggctgctggactcctcctacaca

SEQ ID NO: 430 - DNA, 389 bp, Homo sapiens
tcctcctacacaatttatttgatgttttattttggttttttgcatcacctcaatctgttgggggagcccctgcccttcacctagctcccttggccaggagcaagcgaagccgtggctttggggaagctgccctcctcttccccctcacactacagccctgctcggggagaagggggtgggtgctgcttgtggtttagtttttgtttgtttgtttttgttttttaattcaatctggaatcagaaagcagtggattctggcaaatggtccttgtgccctccccactcatccctggtctggtcccctgttacccatagccctgagcaccaccccaaaagactggggaccagccccgtcccctgcctgtgtctctccccaaaccccttcagat

SEQ ID NO: 431 - DNA, 706 bp, Homo sapiens
aaaccagtaccttcttaaggtgcttgatcaatgtcggtttctttcttcctccttggaccttttcatctcccagaaattacccctgtggtctccattgcctacaaagtcctggaagttttccccaaaggccgctgggtgctcataacctgctgtgcaccccagccaccaccgcccatcacctattccctctgtggaaccaagaacatcaaggtggccaagaaggtggtgaagacccacgagccggcctccttcaacctcaacgtcacactcaagtccagtccagacctgctcacctacttctgctgggcgtcctccacctcaggtgcccatgtggacagtgccaggctacagatgcactgggagctgtggtccagtgagtgcggtggggggcacagggctgaggaggcaggtggggtgcagatcaatggggagctctgggagtggggattgtgaaccttgctggggttagagagagccagggtgtgagggtgtggacaaggacaggctgccacctccaaggccattctcagtcccttggggcctttaatcaggacttgctgtccctggctggggccctgagggcacagtctcctggcaggggcctgagggcacagagggaaagagcccgatggtggcagaaatgactgggccccagttgtcagctcggacctcaaggtgataaactaggcacgtttgtctgggcgca

SEQ ID NO: 432 - DNA, 1487 bp, Homo sapiens
ccaaatgtgaaattgtgtggtacacacggcaggtagggcagcagcccagacacaaggtggagggcaaactctagaaggcggcctggaggaggcggcagccacagctaagctcattaggcattttgtaatgaggagaacttactgaggaggaggggtttaaaaccgctcagccatgcctgtgctaccttctcccaccctgccagagccagtgtctgagctgcgggccaacttcactctgcaggacagaggggcaggccccagggtggagatgatctgccaggcgtcctcgggcagcccacctatcaccaacagcctgatcgggaaggatgggcaggtccacctgcagcagagaccatgccacaggcagcctgccaacttctccttcctgccgagccagacatcggactggttctggtgccaggctgcaaacaacgccaatgtccagcacagcgccctcacagtggtgcccccaggtgagagggcccttggatttccagaggggcagctggcgcttctgtgccgggagggtgctagtgtccaagacacaggtcgatgggaagtgggacagctctacccggccactgctgagagcagagagggcacaggaggcaaccatgcccaccctggcccctgcctaaaggaagcccaacccagctgcctccgccccctcccaggagggttgcccagggcacccaccatcgtgctggttggcagccttgcctccactgcggccatcacctccaggatgctgggctggaccacgtgggccaggtaggaaatgggtgctcgatgcagggaggagggagagctgctgatggcctgagaggtccaaccgggccctggctgcagagctcaggtggtggggcttgcagggcagggctgtggccagggcaaagagcggccatcaccgcttacgcatgactcgaaggtgtttatgaggacctactgtgtgccatgtgcctactgaggcttacacattcaaggcgttatcggaccctgaccagtgctcccaggtgccctgtaacacagtctgctggcctctgggagggcagtctcctaagttctttatggggtctgagcagggattgcagggatgatgcctccaggagaccaaggtggaccaggagctcctgccttctgtgagaaccaccttgggcagtctttccgaggtggtggcaagagcctggggcccagcctcccagggtcccctctccaaggccatggctttactaacatgtaaagtgaccaaggcctttgtagtgtctgagtgcaggcaccacaggcctgtgtgctctgcctgtctggctttggtggtggccagccctgcctctgtgaactcatctctctttgtttgggagacactgccgtgtcctggttctcatcctctgcccgtggcccaggcccttacgtggctctaccaggagtctgtccttggcactttcccatctcacttctaccaagtctgttctttccagaagccagactcg

SEQ ID NO: 433 - DNA, 612 bp, Homo sapiens
aaaaaaaagaaaaaagcctgccagctgggattcttggagtgctggtggccttcagcaaacacagacactgttggtgtgagggcttcaggagggtcacagaaataagggggtctgtgtggccctgtcctcgcctctcaggtgctgtcacatctctctgggtgtagggagagggaggggggcacactgcgaaaaggcccagcccctcccccccacctgctcccctcttccctggagaggcaccccacctcctggtggcccagtcctatggttcaactctcacgtggtccagctcacctgggttgactgtgagccccacctggcacacctgctgttgttaatctgcacctgcaactagcaaaggggggtctggaattcttccgggttcagtcagcctgtgatcccacacctctgtctgtacaacctccgctccccactccaacacacacagagcctgccccagcctaccctgcaccagaccctctgtaccggtttttcttgggatggaggtagagagggacggaggcgagagggggctgaactggaactggattaaactttgccatctgcctgtcgccctgaaaacttcatttctgtttgcatgccatatatata

SEQ ID NO: 434 - DNA, 547 bp, Homo sapiens
ttgcacaccatcttaagtgtgacgccacactgcccttcacagccttggggctctgcccagaccaggaggaatggggagggggtctttgaccctaccccaggcttagccccagagaggaggaaagagtggcaggccaggcagggaggggctccagggtgtggcctgggtttttcagtgggatgggggaggggttgcttatgagcctgggtgggttcttggtaggtggtgggcttcctagaggaggcggtgggagggcaggggcaaagagggtgagcggtcctcagttcgtccgtcttcccgggggactctctgaccctttctggtccgtgctgcggccggcgtggcccggagactagcccctcaaccccgaggtggggtggacccgggtgctccgcggccacagcccctccccgcctctagaagcgcagtcccgcggctcgcccgccgctcgcgagggccgcactttgccctcggtccctagcggcgcctggccacgcccccggcgggtggagtcgggcggggcgccgggcaggttcctctgcgttcc

SEQ ID NO: 435 - DNA, 1566 bp, Homo sapiens
tccagcgtcccgggccccgccttcccgccctccacagtctgtcccgctgtcccctcccggtcccgggtcccgccacccaccccacccccagcctcgcgccccgacgcggggtgtccggatctccgcagggagcgggcccctgcctcgctggcagtgggaggagtttgggggcggctcccggacaggtggcccgcacgccgcgactcccagattggggagttcaccgggacggggttttccgaagccacgtggggtaagggagggggcggggggcgacccaacgcccggaaacagggtgtccttcccactcggggcaggccacgggtccgccttcccacccgaagttgagggaccccaagatgtaccccctccctgtaaggtgggcaatacctccaaaaccaggttttgtgtgtgtgtgtgtgtggcggggagggggcctgttcttggacagccagccctgaaagctggagggggtggcatgagggggcaggcagaggtgggcctgctgtgcccagaccatgcctgggcctggagcttctgaggtcctccagggcgcccacaccagctcccagccaggctgtgggatctgatcgcctctgtcctgggctgtgtccaagaatcaggtgcccagtgggtcgggatggcagtgccaggagtcctggatgggcaccctgctcccatcatcccggagatccggcttcatctccatctgggggcggggcctgtgactgccagctccagagccctatggagagctccctgggacaacagggcaggactggcaggggagagtcctggggccatcccagagggatcctgatgctcacagacctgtcccacacctgctgaggtggagcaggcgtgggtggtggccttcaagtttagggaggtggtatggggctcttcccaaggggctggagctcccctacatccaccctgggtcctccaggtgtctgagttcagagctgtatccacaggcctgagttagtccccttgtagtgccctgtgcatgcagggccctctgtggggtgggagacagactgggagggaccaggatgccacagaggctgcaagtccttgtgtggagacagctggccaggctgaaccagggagggttccaggggttccaggaggtgaagacacaggggcgccagcatggccttcccaagagggcctgtccaccttcaccaaggtgttcaggcagaggctgggtgctgtagaagtgacttgggctgaaggtgacgggggatgggtagtctttgtgacttggcctgtcttggttaaacctctttcaaggtgaggttgggctggggatggaaggactgcccttcatccatcaggtacctaagcagaatgattcctgcagcaggccgatggggcaggagcagcccctgcctaggaggtccctgcccattccccacccctccccggtccaggattcccaggggcaggccccctggtgcctgcagattctcatcctggggtgcatcaggaagcactttgctcatcagctcacctccacaagtttggaggggctaagatgtcagcctccaaaaggggacagca

SEQ ID NO: 436 - DNA, 1540 bp, Homo sapiens
cccaaaaggggacagcagtagtgggagaggccagcatctgtacaccccatcagggtccccgctgtgtgtgcccctcaggcggccaccagccctaccaggtcctcccctcccggcaggtcttcgccttgatcgtgttctcctgcatctatggtgagggctacagcaatgcccacgagtctaagcagatgtactgcgtgttcaaccgcaacgaggatgcctgccgctatggcagtgccatcggggtgctggccttcctggcctcggccttcttcttggtggtcgacgcgtatttcccccagatcagcaacgccactgaccgcaagtacctggtcattggtgacctgctcttctcaggtatctgcctgtggcacctccatttgatcttgggggaggcattaactctagggttccgcagctgggagggtctcggcctctctgggaggggcagggagcagctcactcctccagggcatttttaggaaagggttttcagctagtgtttttccgtgcttgaatggcaccagccctgcctggggtagctagaagctgagtggacctgcagcacacccgagcagatgggctttgcctctgccccttttgtcccctaggctgtctgctgtggcccaccctgccaaggcccgagtgtgggggactttggaggtggctcccggcccggcttccaagtcctcccctccatagtgtggaggctcccccgggaggtccctgccctacctgcccgcgtcccctcccagagtcctggaaagcccctccctttccatggaactgacgcttcacccgtcctcccccagctctctggaccttcctgtggtttgttggtttctgcttcctcaccaaccagtgggcagtcaccaacccgaaggacgtgctggtgggggccgactctgtgagggcagccatcaccttcagcttcttttccatcttctcctgggtaggatggccaggggccggttcttgggtcaagggtggtggagggtggggtcccccacccacctgtaccctgctgtgctccccctgcagggtgtgctggcctccctggcctaccagcgctacaaggctggcgtggacgacttcatccagaattacgttgaccccactccggaccccaacactgcctacgcctcctacccaggtgcatctgtggacaactaccaacagccacccttcacccagaacgcggagaccaccgagggctaccagccgccccctgtgtactgagcggcggttagcgtgggaagggggacagagagggccctcccctctgccctggactttcccatgagcctcctggaactgccagcccctctctttcacctgttccatcctgtgcagctgacacacagctaaggagcctcatagcctggcgggggctggcagagccacaccccaagtgcctgtgcccagagggcttcagtcagccgctcactcctccagggcacttttaggaaagggtttttagctagtgtttttcctcgcttttaatgacctcagccccgcctgcagtggctagaagccagcaggt

SEQ ID NO: 437 - DNA, 1480 bp, Homo sapiens
tggctagaagccagcaggtgcccatgtgctactgacaagtgcctcagcttccccccggcccgggtcaggccgtgggagccgctattatctgcgttctctgccaaagactcgtgggggccatcacacctgccctgtgcagcggagccggaccaggctcttgtgtcctcactcaggtttgcttcccctgtgcccactgctgtatgatctgggggccaccaccctgtgccggtggcctctgggctgcctcccgtggtgtgagggcggggctggtgctcatggcacttcctccttgctcccacccctggcagcagggaagggctttgcctgacaacacccagctttatgtaaatattctgcagttgttacttaggaagcctggggagggcaggggtgccccatggctcccagactctgtctgtgccgagtgtattataaaatcgtgggggagatgcccggcctgggatgctgtttggagacggaataaatgttttctcattcagtctccagtcattggttgagccacagcctaggggttggaggaagactccactctgggtacacccttaggggctggctttatggaacttgtagtttgaacaaggcagtggcaatccgccccctccagcctgcctggctggcccccttccctctgtctggggtcgcattccgcacaagcctttcatcaacatcttaaaatagtaactgtgctcagcttgtaaacaagatgatttttctggcctgcagtgccagggtcctgctgctcccttcctagagtgggggtgggggtacctgggagttgtcggtgaatgcccctttcttgcactgaataggggtaccataggtaagaccaggtttctaccttcctccagggtcagcacctctggagccttcctgggacacggccttggccgtccagcccacccctcggagataaggcccatctctggaagaggtcaaggccctaaagcaacttctggcttcttcttttgagcaatgacagagggagctgtcatcggcaagtcccgattgtttaaaaatccccagtacgaactaacagggcactgctcccagcctcacccgatggctttggcttgggacacatcactagcgaaggggagagggaggctggggaggccctgggagtggtgaccctgcctgcacaggacacaccttaccccagcgatgcttgcccccaagtgagctgccaacagcccatctctgaggcacagctgagagatgtcttgactcctgaattaccaagagtttgtttcacaaacaaaacctgacctcacaggcccagcgggcaggacagtgcctcttccttccaactgggccccgggctcctctgtacacccatttttgtcctgacactggcccagacaggaaggcagatgatgttctgcttaggacacaccccatgatcatttctcagttcaagggttgtggttaagagatcagtattactacagaaagatctggg

SEQ ID NO: 438 - DNA, 1933 bp, Homo sapiens
tctggaagaaaatccccacccaaatcaagttggagctgtccatgagacccagggaaacccaggtgaaagagaaatgtgcgtccaccaaccagtgaattttcaattagttaatttcataagctacagcagaggcgtggaccctgccctctccacacttgaagagataagcccctgggatccaagtcccagcaaggttggtgccacccatcttggtgaaagatgctgttgttcctgtggaaaccatcaccagaggtaggaagggctttgagcccaaaaggaaacaagagggcgtgaatccaggccatcctcaggggagggtgggagcccatcccaggcagagaggcctaagcctcagtgtgggccaaggctcaaaggtgctggcacaggcttcccagggagaacagaaactcagcagtgaaagccgcagaggggaagaagcaggctgatgtcaacagcgtggggctctgtccctcaccccaaggagagggagtgtgccagatcccaggccaccaagcggggccagctccagcctgggcgatcgtcccagcagctgagagggaagctttaagcagaccagtgggtaggagaggagggagcatgcggcaggtggggcagccacacaaaggagagttcccagaaggccaaggtgtggtcaccctccacgcctcccgacttcctcctggagtggctgggcagcatgcagggcagcgtccagtaggcggcagtggcaggaagggagcgggcggccctcgcaggtccctcagttggcagggctgcattgcagaatctgctgtggggcaaagagcttcctggcagccacggcttcccctggctttcctggcactgggcagttctctttgttgtccggcccggcaggctggcctgaggccttcttgaagtagcagagccgacacacggagtggtacttgtctgctcccccaatcacctcgacctggccgcagggacaggggatgggtgaagggccaggacaggaaggaggcagagccatacccccaccccgccggcctgcagggaaggcaggtggagctacctccttctctgtgccgagcctcttggtataggcggcttcccggaagcactccatgcacaccgccgtcagcttcaccacgctctcggccagcggcaccaggttcaggatggccccaaatggctgcgctcccatggaaagacagagggcgctcagccaccttaccaggtgggtttttcttttaaaccctctgattcacaagcactgaagccaggagagtttgctctgaccttagtccttcccccaacccccagagcaccatgcccggctctgtccctttgccaattcaaagcacctgccgcaacagatggcacgcagtctgcacagaccatggagtcccttggctcagccaaggcctgagcagctcggccgtaaccctgtggtggctgagccctggtcacccagagctggtgtctctgtgcccatccagaagcctcttgccctcctcaatcccagctccagacctggatcagacgccttaccttcctctggaaggtcccatccagtgcagccacaattacggtcttcccggcgttggccatggcctcgcagaactccacgatgtcagggaactggaaagggcacgtggagaaagagtgtgagagcttccaccccagcagcagctccctggagccccagcgaagacgctgccagatctgacaactccggccatttggcccggagtaactcttaattctcccacgaggctccccaggccgggggactgtgtccacccgcacgccccccagcagacgacaggtacatccacaactgcgcagccccttccccctgcagccagcttccctccgagtccaggtacccaggactcagcaccggacttccacaccagctgtgctgtttaacactgcagtggccaaaggcctg

SEQ ID NO: 439 - DNA, 726 bp, Homo sapiens
gcaaggaaggtcctgttgtttaaggatggaaggccctaagttatatacatgctcttcggtgaataggtgggcgctttgtgctcttgcctcccccgttttaaacgggtaatgtgccttgagaaggggcgggggtcctactggccatttacagagcaggatgacacagcacagccttctaaattcaggacctgcacagagcacatttactgtgtaaagcaaacttcactttggcccagggagaagctgaaactctggcaagtgctctggtgattctcatcaatcaatcatatcactcttagctggttgagttcatatgtccagactggcctttgggttgggtgaagcagggatgtccttgtccttgggtgcagggtctctctcccagggccactcaggctttctcagcccaggtactgaggtttgaggttattgagacgtgagggcttagcaaggtgaggactaaggggtggctcgaaaaattccagtgagatccaagcaaagcccaacgtgactgattgcgctcagctgactgcaggggtctctggagaaggaaacccagagactccagcacgccagggcccctccccaccatgcactcgttccctctttttctctgaggactcatgacatgtcacgaaaatgcagctcccagcctgcaaggagctgtgggccggcacaccacctgcgccaggggcgcgccccctggagggctgacgctgccatggc

SEQ ID NO: 440 - DNA, 468 bp, Homo sapiens
agaaaaaaagtttaaaaaaataaatcagagctcctactattgccaagcgaccctgcaagcccaccacacactgtgcagctgttgatgcaagggtgcccacccaccaccagcatctgaagcacagcacccccagctaggagcttcaggttttccagagatttccaggtgagtctctcttggatgccaacagtttctacagagcagtgtgagcacctgtgtgtctcgcccggggtacaaagaagcacagaagcttctgacccagggccttcctcaggatggcacggtggctactctgtgaaaggctttccctgctgacccagaaaacgggaacaaggcaggttcggctgggcttcatccactgtccacgtagacaatgaaggagcgaaggacagtccttctgctgggtcccatgctaggaacccctctcctcgatctagaactgcttgcaatgggaagaccctgaacttc

SEQ ID NO: 441 - DNA, 853 bp, Homo sapiens
gacccggaacttcttgaagagaacaagggcacacagaggccagggcagaatgctgatgtctgggtagggtgtaataaatactcactgaatgaactcaagttttacttgctggccagggaggaagtagaccgagaaatccctcctataggctgaacaggggacaggacttcatacgctggctcctgactcagggcatttggatgtcgaggaaggagaagggaaaggtttctgcctcgggggtctgggtcagcctctgtcaacaaggtttacgcagagccaggagaacagagctattgaacaactcacagcggcaggtctgaaggagggagagccttgccaaagctgaagcttccttgttctgagagggccatgtccccaaagctgatgcaaaatccctggatgcattctgaggccacagtttgggagcaaaagagaacagctgcagccctattcccagcctgggctcactttctcgccaggagtccctcaagcacggggcagcaacaacgacgtctccacgtacgcagaggcatgggggtgctcaggggcgcacctctgaaggtcagaaacggaatggccatacccaagcggggaggagatgccagctgccgggtggtcgggaacccagagcggacactggcagcctcaactccacagggcagatgccccgcacaggggaagggacccgtcagcctccccacgggaatggaatttgcagctgtgactcatacagaatgttgggcaagaacagaaccaggaaggcaggactggccttttgaggggacaggccctgtgacgtccgggcagggtattcaggccagagcggcctggctctgtgctgggaggcagggcg

SEQ ID NO: 442 - DNA, 693 bp, Homo sapiens
ggcggcctccccatcaaccggcctggaaccacgtagggggtctgtgagcgagaaataaattcctgttatgtttatatcaaaccaccacattgtgtacttcgaggcaaccctaaaagtacctaagaggtcaagtctgctaaaccccttggagagagtttcagtttcattctttgtgataaactaacaaaaataaaatctccaaagcagaggaaagaaaactaagataacagaaaataacccagaaactcaaccacagaatatgttcctgaggaaatagaaaaatctggaaaagtctaagaaaagattttcaggaacataatggaaggaacagcataaatttaaaaataacccaacagtaacttgtcaaacaaaacggagcatgatgaattagagcagcagatgtaaaaatagtcactgaaacaaaacacactctggaagatggaacccagaacacctcagagatggatgaggagagaaatacctgaagtgataatggcttcattccttccccagaaatgaaaaggcacaccagctataaagcaggataaatgaaacaaagcttcccctacacacattgtgctgagagagaacagatagaatacctgaccagaggtaacattagagagatggcggccttcctctgagcaaaaacacaatgaccagcgctgctacttttcaaagcaacaagatcaa

SEQ ID NO: 443 - DNA, 462 bp, Homo sapiens
cgaatcctacaagactatgacactatgacagggaaactagaaaggggccttcagagggtattccaacactagttgtagctatttaaccttgttattttactaaaagatcagataacttccaagtcagcgagggaaaacgggaggacagagcggaagctggcaggaagagtgatgccaagacaagccaacttacaaactgcccctcgtcgatgcctatgacagccacgcccagggcctcctgggccacgtctcggagcaggcaggcgggcagtgcctccatggtgttcctgggaagagaaagccagagcgtgagcagggccagggaggccagaagccacaatgcaggggccagggaatggcactgtcgtgaccacctgctacctgcaaagcaggctcagtgttcacccagccgggctttgagaagttagcacctatgggaaaggccctcgtccagaaaaccag

SEQ ID NO: 444 - DNA, 436 bp, Homo sapiens
gcatctggcttcaggagcccctcagctcccaccgaaggccacacgccgggtggatctgttctctgcacagccatagcaactctcggatacagctcccagccagggctctgaggctgaagccctataatgtgtggcacagcatggctttgccactgggtgcccaggtggacaagtccagaggaccaagcaaagcgtctcaggctcagaaacatcaggcccacatctgctgccaaggaagtgaatttaactcccaaactgaggttgcaggcggaaatgtccagcgagctcaaacagctacacataaaacagggaagcgtgaaggctgccaggtgacgggggagccagccaacaacggacaactaaaaaattaaacaaaaatcaacgtgcaggccaaaccaaaccagtctgcagcctgtgtgaagctgaaaccctacgg

SEQ ID NO: 445 - DNA, 645 bp, Homo sapiens
gctccagcccagggagtggagagtgtgcgctaccttgccaagcaccttggaaagtgtgctgatttgaatcattcaatgttcaaatgattaaccatccccattaaagagagtcctaacagtgtgtcctgtgccttgtgattttccactggacaggactgcagggggcagggactgaccggtcatgtgtgcagaagctgctgctgtagcgagtgtctttggcatacttgatcaccaggcacttgtactgagcaatctggaagcgacggacgcgtctcatcaactctgtgctgcaagaggagagagggtcaggtgaggtccacggcgggaggagtgggagaaggagacccctccccaacaagcctggctcctcattgtccctagtggtatgcagactgagcccaccacagccagaaaagagcagggcagagcaggcagggtataatatccctacaaagagggttggaagtcagaattctctatggggaagaggtccaggaatggtactcaggtggtcccaggaagtgtgggaggagtaaccttctccaagatgtagtggggaaggcagaagcaaaggctacatgtagagggaacctgcgactgcattccaaagtaacctcatcccagagttgttcccagagttcagag

SEQ ID NO: 446 - DNA, 397 bp, Homo sapiens
tggtgcgtgggtagtttactcaagaaactcactagccccacccgggtcagggaatggttctatcacctcaggagagcagaggctccacggcttcagactccttggtttagaaagcgactacgtttccttggccttagaaggaaacagccacattgaataggggtgtacaaaaaggcctggcctacaggggacacaactggttgccaccttctcagaggacttggtggggaagacagctaagctgtaagcagctgtcaccagctccaggagggagtggcgtccacacaggacgaggggcttggcctgggcagaagagggcagagacttcctcctggactgaattcaagggaggagcaccccaggcgggagctgtaggaggctgtgctggtccttctag

SEQ ID NO: 447 - DNA, 961 bp, Homo sapiens
acgggacaaggggtccccggagaagaggaaggagctccaccccagccccgcgaagccattacctttttcctgagaacatcggcccgagaatcacctaggagagaaggtgaggtcatttgagggcccgccctgcgcggatgcctggacacaggctatcaccacgaccacctcatccccagccacgcgcagggctggcccccgcacctggatctgcccccgggtcttgctgggggagccaggcagcacagtgggcaggttaatgcagctcattgcgcctccgggaagttcacgaacccgagtactctccaaggccgtcccgcagtaagcccctggttcccgcgccgaccgctttaaaccacggcgtgctggccaatcacgagccggccccgccgccatggggccaatcagcgcccggccgctgacctggcgggagatttggccgcagcccgccccctcgtgggaggaatccgggacgtgcgcccagggactgggagggcctggaaatcagggcgatggacgtggctgatcggggtggggcctggtctgagccccgcctcggtccgcccaccaagtttaaaggggcggagcgaggcggggctctggccatataaacagagggacgcacgcccatgcggctgtagacgccatgatggatgtgtctggtgtgggtttcccaagcaaggttccttggaagaagatgtctgcagaggtaggtggattgcagggagggactaaggggctggggcggagttagctcatttattagattggaattccaagaaggaagcttagaagccgtctagagcactcctgtgggcatgcagagcgcctagtgcgtgccaggtccccagtgcttgagcaccatggtgtattttaccttctcctaaggatttttgttaacctggttttcaggataaagaaaattgaagtcctgactatgctaataatatccgtagaccct

SEQ ID NO: 448 - DNA, 394 bp, Homo sapiens
tccatagacccgcaggaggttaggggacaaagttctggaccttgatctgaggttacacaatgtttttgggtctgtgcttatgtggcacaggctgaaggattcagaacagctggtatttacattggggttgtgaaggttagaaacatacaggccgggtgcggtggctcaaaaaaaaaaagaaagaaagaaaagaaacccattgtataatcatgatcataaataatagcaacaaagatggtggtagtgatcacagagtgtgccaggtgtggctgtaaggatcctacaggtaataacctttccaggtacagattggacagatccaaggacctctgacaaagagctccttcactgggaggaagaagcaacccacactgactggcttgctttattttac

SEQ ID NO: 449 - DNA, 271 bp, Homo sapiens
tctgtttttttttttctttttttaattctccaaactgcctcagaatggttccttgttactttctgcataaagtgtgaaggtgttagcccgacattcaccgcccctcctcctccagcccagcctcccagcctcacctctgtgtgtcagccatagggcctgccagcatttgcaaactgacctttcattccttcctcctcacctctgtgcctttgactgtgcagtgacctcctgtggtcagaatcgcaccctctcagcgcagatcagctcctcc

SEQ ID NO: 450 - DNA, 746 bp, Homo sapiens
acctggcctcccctggtcgtaactgctgtgggagtggtgcccatgatggcattaactgaattcgtttgggggacctcatctccccttaaggctgccagctggctaaaggcacagcggtcgctggtatacctctagaccatggatctgagggcatcttggagaccctgggatactggggcgagggcttctaaggcagagaggagcagccgggcatgggcgagggggaggggcacactctgttgagaaggaaagtcttacggagcctcatgtttgtgccctgcaggagctggagaatcagtactgtcccagccgatgggttgtccgactgggagcagaggaagccttgaggacctactcacagataggaattgaaggtactagtgtgacctctccgtggccgcattgggtgtccttaagcatgtggcagtgattcagaatgctgggggttgggggggctgtgctgcaccacctgggcctcgaggggcatttcccaaacaccaggcactttataaacctccctgctcaggggcaggtgcccaggaccccttgctgcagggactactggaggcaggagaggtccgggggaggtccacggctcagtcgaccatgcctggcctttcttgctcagccatccatacccaggcccgtaaggctgcgggctgtggttggcatagggaggtgaagtgaacagaggaacgttccccatccgctgctgaatgtggaatgcggtcactattcctaaaaag

SEQ ID NO: 451 - DNA, 478 bp, Homo sapiens
actttcaccttttctttctttaaagaaatctggacttgggaacctgtaaactagtgaagtcttaaggtccatttccatctctaccctgtatctgcaaagtgctgtaccacgatctgaacacctggtaatgcatccgtgctgggatggggagcaggccccgaggaggaagtgtaggtgaggacgcagccaaccatgcttggcaaattagctctgttgcagcaggctcaacacagcctttcagaggcagatgcctgggctcctgggcttggtggttttctaagcggagagaacccaggaggaggaacagacttgttagaagtgtattccagcaattccaccatcctcctgtctcaatagattgggggggagctgtttcctgggctcttcatgttccttgctgtgctcagctctgatccaaattcatctctatttgctcgataaatacatgagtgtggtgaaacatacaagagctgtaagc

SEQ ID NO: 452 - DNA, 291 bp, Homo sapiens
actttgccttctttgcaccagggagaattatattttttctcattttttatttgtattcgtccttacaatgccagcctgttaacttgcaatgagggatgttcgcttttaatgagtagacagcctcatccccatcaaggcctggccgccctcatctgggctcagggagaacaaagtctaactgctgtgtgagtatggtcagggcgcaggaggctggcagagagggggtttaagaaccatttcctttaccactagcttttaaattagttttactgtgaccttcagtaaaaatac

SEQ ID NO: 453 - DNA, 470 bp, Homo sapiens
tgagttgtaaataatagcaatgaagcttttgctttaatgagaaaggaagtttgccataaggtttgttctggggtgtcttgctgaagccctcctgtgttcttgccctggggttcagggactggagggccctctgtggggggcatgagtcacttcattctctgtctctgcaccccagctgtcctctcctagagagaggcaatttctctttcccgaggttagtagagttttttaatatctgagagaggcttatgcatgataatgaacacctatagctgcttggttttaatggccattccacttagaacataaattccatgatgtttttcttaatcgtagcacaactttaatctagtccatttataggcttgagaactcctgtgtgaattaaatcacgaccttctgatgaagccactccgatgagcctgtgaggcacattgtcttcacactgtgctggggcagggttgttggca

SEQ ID NO: 454 - DNA, 524 bp, Homo sapiens
cacacaaggcttttcagtgaaatgctcactcctcttccctttcgtgtgcccagttcccctggcccccgtcaaggtggccactgttcttcatatggatatagactccccctccctttcatccaaatggccccgtagtacacacagttccaccctgccagtttcacttagtatttcttggagatgtttcctcatctgtacgtagatagcttctcgtcagtacgtcagtacgcagggagccctgcaggggcaagtggttggtaacgtgggtgctggcaaaacaggttttgcaacctcactggcgttctgcaaaggcagcttcctgcctggattggcccatgggcaacttccctttgatttccctcagctttaatccatccagctgaagtggagacagcccggtttatggttctgcattctggcatagacgcaattcgtacaagctctcagccccatgctttttcttcctctgccgtgtttacccttctggagttgcagaatgaatcacccacccgagggaagcacgg

SEQ ID NO: 455 - DNA, 459 bp, Homo sapiens
aggcttttttttctctaggcctgctgtggccaccaaggctggggaccagggggcctccagggacagggatcccaagttgcacgttaatacacggagccctttctgagatgcaggttctacagggaactggattccacctcttttggggagatcaacccagcagcccaaggatcccctgatggtgcctgagcacagctgtgagaagggggtatctggatccttggggtgacaggatgggagaggtggagcatgggcctgcaggctggcccccagaggccttaggtctctgctgactagctagaattctgaaaactgtgttatgtaagacgtttagcatctgcagtgccaaataaaggtgacccccacaacgacataaaaaaaaaaaaagatatgtccaaatcctaaccctgggaacctatgaaaatcctaaccctgggaacctatgaaggtatttcctta

SEQ ID NO: 456 - DNA, 369 bp, Homo sapiens
tttctaccacctgagcttgtgctgacagcgacttgtccatttctgagacagccaccacaagggcccgggccaccaggaagagcctgctgcatgtcccctatggagacggcgaaggggagaaagtggacatttacttccccgacgagtcgtctgaaggttgtcggtgaaggggctgggggtcccggggcttgggggtccagtggcagagctcagcagggcgggccttgctcacacgccctgtgcttggttttgcagccttgcctttcttcctgttctttcacggaggatactggcagagcggaaggtgagtcgggggatgtggatggtggactgcaagagagattccactttccctgggggactcctcct

SEQ ID NO: 457 - DNA, 1304 bp, Homo sapiens
tctcacatgggaccagaaaggggtgatgctgtgcgtggacaggacatctggcaagtggtgtgtccaggacacaggaagcagcgtagtggccaagctgcctccagctgtcacatctgtgtgtctctgcagtaaggatgagtctgccttcatggtccacccgctgacggcacagggagtggccgtggtaatagtggcttacggcatcgcccccaaaggtaataggagtggttgctgcaggtccgagggccggtgggctttaggaggaagtgcatccctgacccagctcatgctctctgtgcaggcaccctggaccacatggtagaccaggtgacccgcagcgttgcgtttgtccagaagcggtatccaagcaacaagtgggtgttgccagtagattttcttcctgttggacctcagtgggtgggaggacagtgcaatcagtacctaggatacagccaagctgcccctctggcctgtggagcagaaagcaaattgggactcttcgaagggggcctgatgttgtggggaaactgcgtgcaaatccagctctctgctctgacccctcccaggggaatttacctgtgtggacactcagccggggcccacctggctgccatgatgctcctggccgactggaccaagcatggggtcacgcccaacctcagaggtttccatgggagctacagcctggctgggcaaccttcatctccccatgagccttggggtttgggccaactgcttgaaatcctcccggccatgagtggcttgaccgcagggcttcgagccctctgagcaaggccttctctgcctcctctgtgccccttcccctggtcctgcccctctggcggtgggggtgggctggccctgccttgctccgcctggagcctggccctgtgacaattctgtaccttcacaggctttttcctggtgagtggggtctttgacctggagcccatcgtgtatacttcacagaacgttgctctccagctgaccctgtgagttacttggccaccacctcccctggctcaccaggagcctggctcctctctgtcctgacccctgtccactccccaccccagggaggacgctcagaggaatagcccccagctgaaggtggcccaggcacagccggtggaccccacctgccgtgtgctggtggtcgtgggccagttcgactcccccgaattccaccgacagtcctgggagttttaccaggtactcccagtgcaggtttgtggccagaggtcgagggtcatgtgggctcattattttcctctttcttttacccaagtggacaagaccctcca

SEQ ID NO: 458 - DNA, 440 bp, Homo sapiens
ctgtctcatttccttaatcaaattcctgcaaagagctgctctgattctggggcttttgtgtcttctcttcctgttccagattatcttgaaaacaatcttccagtagttctgacgatacttggagcctggtccacgtgcatcccaccttgggaagcctctccaaagagctttcggagctgacactgacagcttcagtttcccccagcacccaggagagccttgctgtgtctgtctgcccggcaagagtccattctcactgctgggacactcatgaaaatctccacgtcctccctcttcccagcctggatggagctccagggctggggaacgtccgcaagtcaatgctcagagatgcccggagctgcctcttagactcgtctggcccatctacctgctgacagagcatgacaaagatgacgctcaaaagtaatgccattact

SEQ ID NO: 459 - DNA, 290 bp, Homo sapiens
ggtaagggcttccccaagccagctaccctctgccttctgcttcagtctcctgtctgctctgtcctccatctccctgacatttgggtctgtccctgaatgccccggggtctcagcgttggggccaacaccttgaccttgacaggacaatgctacccacatgtaggacaagcttcctctgcacccgagagtggtgtgcatgtcccaagaagccagctatatccatccaccacccaccccaccacaccgcctctttctctcacaccgaatagcattcaagaatttccactgtg

SEQ ID NO: 460 - DNA, 350 bp, Homo sapiens
ggaaaatacttttttaaacgagggcaatgtgaatctgaaatgccatttgaggaaagatctgttcgcctgacatcctgtttgagcctgggtggacaggacagcacctgccagcatcgggaagcactgcagatgggaagaggcttggtcactctccaaaggtggcaggagttggagggggtgagctgaaggtaaggagaaaggaggtggggacccaggagacaggggctgcgcagcgggctcggggctgacacccccacggatacagttcactggggctcaaacataaaaggaacccaactattgtgggaggaaaagactcttctgcctttctgccttttctttttttcttt

SEQ ID NO: 461 - DNA, 782 bp, Homo sapiens
tgacccctctgccctttcaaaaactatgttcgttctctcacagccttctcttgtcatattaagtccacaccgcaggcctaatttgtccagtgaatgctatgcaaatatttcatgcacctgctgatcgcaggaatgatatgtacttggtacgcactgatcgtacctcggggtgggagaagagagggcaaggaagcaaagaatagccccctcctttcctggtgcaccttcagatgtgccgatggggcccaggctcgctgcagatggcccccttcccagagacaggggaggatcctccacccactccccagcctccaggaccatcctgactcctgccttcaggcactcaagttatgcgtctagacatgcggatatattcaagctgggcacagcacagcagccccaccccaggcagcttgaaatcagagctggggtccaaagggaccacaccccgagggactgtgtgggggtcggggcacacaggccactgcttccccccgtctttctcagccattcctgaagtcagcctcactctgcttctcagggatttcaaatgtgcagagactctggcacttttgtagaagccccttctggtcctaacttacacctggatgctgtggggctgcagctgctgctcgggctcgggaggatgctgggggcccggtgcccatgagcttttgaagctcctggaactcggttttgagggtgttcaggtccaggtggacacctgggctgtccttgtccatgcatttgatgacattgtgtgcagaagtgaaaaggagtta

SEQ ID NO: 462 - DNA, 497 bp, Homo sapiens
ccccaaaatgaaaaagacagtggaggcaccaggcctgcgtggggctggagggctaataaggccaggcctcttatctctggccatagaaccagagaagtgagtggatgtgatgcccagctccagaagtgactccagaacaccctgttccaaagcagaggacacactgattttttttttaataggctgcaggacttactgttggtgggacgccctgctttgcgaagggaaaggaggagtttgccctgagcacaggcccccaccctccactgggctttccccagctcccttgtcttcttatcacggtagtggcccagtccctggcccctgactccagaaggtggccctcctggaaacccaggtcgtgcagtcaacgatgtactcgccgggacagcgatgtctgctgcactccatccctcccctgttcatttgtccttcatgcccgtctggagtagatgctttttgcagaggtggcaccctgtaaagctctcctgtctgac

SEQ ID NO: 463 - DNA, 1124 bp, Homo sapiens
tgcacgcgttctttgaaagcagtcgagggggcgctaggtgtgggcagggacgagctggcgcggcgtcgctgggtgcaccgcgaccacgggcagagccacgcggcgggaggactacaactcccggcacaccccgcgccgccccgcctctactcccagaaggccgcggggggtggaccgcctaagagggcgtgcgctcccgacatgccccgcggcgcgccattaaccgccagatttgaatcgcgggacccgttggcagaggtggcggcggcggcatgggtgccccgacgttgccccctgcctggcagccctttctcaaggaccaccgcatctctacattcaagaactggcccttcttggagggctgcgcctgcaccccggagcgggtgagactgcccggcctcctggggtcccccacgcccgccttgccctgtccctagcgaggccactgtgactgggcctcgggggtacaagccgccctcccctccccgtcctgtccccagcgaggccactgtggctgggccccttgggtccaggccggcctcccctccctgctttgtccccatcgaggcctttgtggctgggcctcggggttccgggctgccacgtccactcacgagctgtgctgtcccttgcagatggccgaggctggcttcatccactgccccactgagaacgagccagacttggcccagtgtttcttctgcttcaaggagctggaaggctgggagccagatgacgaccccatgtaagtcttctctggccagcctcgatgggctttgttttgaactgagttgtcaaaagatttgagttgcaaagacacttagtatgggagggttgctttccaccctcattgcttcttaaacagctgttgtgaacggatacctctctatatgctggtgccttggtgatgcttacaacctaattaaatctcatttgaccaaaatgccttggggtggacgtaagatgcctgatgcctttcatgttcaacagaatacatcagcagaccctgttgttgtgaactcccaggaacgtccaagtgctttttttgagattttttaaaaaacagtttaattgaaatataacctacacagcacaaaaattaccctttgaaagtgtgcacttca

SEQ ID NO: 464 - DNA, 518 bp, Homo sapiens
aagcatatacttcagtgttgttctggatttttttcttcaagatgcctagttaatgacaatgaaattctgtactcggatggtatctgtctttccacactgtaatgccatattcttttctcacctttttttctgtcggattcagttgcttccacagctttaatttttttcccctggagaatcaccccagttgtttttctttttggccagaagagagtagctgttttttttcttagtatgtttgctatggtggttatactgcatccccgtaatcactgggaaaagatcagtggtattcttcttgaaaatgaataagtgttatgatattttcagattagagttacaactggctgtctttttggactttgtgtggccatgttttcattgtaatgcagttctggtaacggtgatagtcagttatacagggagactcccctagcagaaaatgagagtgtgagctagggggtcccttggggaacccggggcaataatgcccttctctgcccttaatccttacagtg

SEQ ID NO: 465 - DNA, 608 bp, Homo sapiens
tctttacagtggattacataacaattccagtgaaatgaaattacttcaaacagttccttgagaatgttggagggatttgacatgtaattcctttggacatataccatgtaacacttttccaactaattgctaaggaagtccagataaaatagatacattagccacacagatgtggggggagatgtccacagggagagagaaggtgctaagaggtgccatatgggaatgtggcttgggcaaagcactgatgccatcaacttcagacttgacgtcttactcctgaggcagagcagggtgtgcctgtggagggcgtggggaggtggcccgtggggagtggactgccgctttaatcccttcagctgcctttccgctgttgttttgatttttctagagaggaacataaaaagcattcgtccggttgcgctttcctttctgtcaagaagcagtttgaagaattaacccttggtgaatttttgaaactggacagagaaagagccaagaacaaaattgtatgtattgggaataagaactgctcaaaccctgttcaatgtctttagcactaaactacctagtccctcaaagggactctgtgttttcctcaggaagca

SEQ ID NO: 466 - DNA, 242 bp, Homo sapiens
cacagaataagtactgggggattccatatccttgtagcaaagccctgggtggagagtcaggagatgttgtagttctgtctctgccacttgcagactttgagtttaagccagtcgtgctcatgctttccttgctaaatagaggttagaccccctatcccatggtttctcaggttgcttttcagcttgaaaattgtattcctttgtagagatcagcgtaaaataattctgtccttatatgtggc

SEQ ID NO: 467 - DNA, 295 bp, Homo sapiens
ttttagacaaggagcagcttgtgtgcctggaaccatcatgggcacaggggaggagcagagtggatgtggaggtgtgagctggaaaccaggtcccagagcgctgagaaagacagagggtttttgcccttgcaaatagagcaactgaaatctgacaccatccagttccagaaagccctgaagtgctggtggacgctgcggggtgctccgctctagggttacagggatgaagatgcagtctggtagggggagtccactcacctgttggaagatgtgattaagaaaagtagactttcag

SEQ ID NO: 468 - DNA, 384 bp, Homo sapiens
tgttgcgctatacaaatcctgaagacaaggatgctgttgctggtgatgctggggattcccaagatcccagatttgatggcaggatgcccctgtctgctgccttgccagggtgccaggagggcgctgctgtggaagctgaggcccggccatccagggcgatgcattgggcgctgattcttgttcctgctgctgcctcggtgcttagcttttgaaacaatgaaataaattagaaccagtgtgaaaatcgatcaggaaataaatttaatgtggaaataaactgaacaacttagttcttcataagagtttacttggtaaatacttgtgatgaggacaaaacgaagcactagaaggagaggcgagttgtagacctgggtggcaggagtg

SEQ ID NO: 469 - DNA, 263 bp, Homo sapiens
caagagttgtgtttgcttcgcccctacctttagtggaaaaatgtataaaatggagatattgacctccacattggggtggttaaattatagcatgtatgcaaaggagcttcgctaatttaaggcttttttgaaagagaagaaactgaataatccatgtgtgtatatatattttaaaagccatggtcatctttccatatcagtaaagctgaggctccctgggactgcagagttgtccatcacagtccattataagtgcgctgctg

SEQ ID NO: 470 - DNA, 319 bp, Homo sapiens
gtaattttttttaagttaacctctgtcagcaaacaaatttaacccaataaaggtctttgttttttaatgtagtagaggagttagggtttataaaaaatatggtagggaagggggtccctggatttgctaatgtgattgtcatttgccccttaggagagagctctgttagcagaatgaaaaaattggaagccagattcagggagggactggaagcaaaagaatttctgttcgaggaagagcctgatgtttgccagggtctgtttaactggacatgaagaggaaggctctggactttcctccaggagtttcaggagaaagg

SEQ ID NO: 471 - DNA, 784 bp, Homo sapiens
cgatgattaggaggcagcttaaactagagggagttgagctgaatcaggatgtttgtcccaggtagctgggaatctgcctagcccagtgcccagtttatttaggtgctctctcagtgttccctgattgttttttcctttgtcatcttatctacaggatgtgactgggaagctctggtttcagtgtcatgtgtctattctttatttccaggcaaaggaaaccaacaataagaagaaagaatttgaggaaactgcggagaaagtgcgccgtgccatcgagcagctggctgccatggattgaggcctctggccggagctgcctggtcccagagtggctgcaccacttccagggtttattccctggtgccaccagccttcctgtgggccccttagcaatgtcttaggaaaggagatcaacattttcaaattagatgtttcaactgtgctcttgttttgtcttgaaagtggcaccagaggtgcttctgcctgtgcagcgggtgctgctggtaacagtggctgcttctctctctctctctcttttttgggggctcatttttgctgttttgattcccgggcttaccaggtgagaagtgagggaggaagaaggcagtgtcccttttgctagagctgacagctttgttcgcgtgggcagagccttccacagtgaatgtgtctggacctcatgttgttgaggctgtcacagtcctgagtgtggacttggcaggtgcctgttgaatctgagctgcaggttccttatctgtcacacctgtgcctcctcagaggacag

SEQ ID NO: 472 - DNA, 1559 bp, Homo sapiens
ggtagatgcatgacttgtgtgtgatgagagaatggagacagagtccctggctcctctactgtttaacaacatggctttcttattttgtttgaattgttaattcacagaatagcacaaactacaattaaaactaagcacaaagccattctaagtcattggggaaacggggtgaacttcaggtggatgaggagacagaatagagtgataggaagcgtctggcagatactccttttgccactgctgtgtgattagacaggcccagtgagccgcggggcacatgctggccgctcctccctcagaaaaaggcagtggcctaaatcctttttaaatgacttggctcgatgctgtgggggactggctgggctgctgcaggccgtgtgtctgtcagcccaaccttcacatctgtcacgttctccacacgggggagagacgcagtccgcccaggtccccgctttctttggaggcagcagctcccgcagggctgaagtctggcgtaagatgatggatttgattcgccctcctccctgtcatagagctgcagggtggattgttacagcttcgctggaaacctctggaggtcatctcggctgttcctgagaaataaaaagcctgtcatttcaaacactgctgtggaccctactgggtttttaaaatattgtcagtttttcatcgtcgtccctagcctgccaacagccatctgcccagacagccgcagtgaggatgagcgtcctggcagagacgcagttgtctctgggcgcttgccagagccacgaaccccagacctgtttgtatcatccgggctccttccgggcagaaacaactgaaaatgcacttcagacccacttatttctgccacatctgagtcggcctgagatagacttttccctctaaactgggagaatatcacagtggtttttgttagcagaaaatgcactccagcctctgtactcatctaagctgcttatttttgatatttgtgtcagtctgtaaatggatacttcactttaataactgttgcttagtaattggctttgtagagaagctggaaaaaaatggttttgtcttcaactcctttgcatgccaggcggtgatgtggatctcggcttctgtgagcctgtgctgtgggcagggctgagctggagccgcccctctcagcccgcctgccacggcctttccttaaaggccatccttaaaaccagaccctcatggctaccagcacctgaaagcttcctcgacatctgttaataaagccgtaggcccttgtctaagtgcaaccgcctagactttctttcagatacatgtccacatgtccatttttcaggttctctaagttggagtggagtctgggaagggttgtgaatgaggcttctgggctatgggtgaggttccaatggcaggttagagcccctcgggccaactgccatcctggaaagtagagacagcagtgcccgctgcccagaagagaccagcaagccaaactggagcccccattgcaggctgtcgccatgtggaaagagtaactcacaattgccaataaagtctcatgtggttttatctac

SEQ ID NO: 473 - DNA, 243 bp, Homo sapiens
caacatccaaggtctgtgttgagagggtgagttgtgcggcccagcttgccccaagcccgtcttgccatcacgaaggatttcctgactcagctgaatctagctcaacaaagcaaaggactaactaagctgcagattttctctccgctgggcttagcctacattatttacacctgttttcagctggatgggaccaaactggggccttgacttctggggtttccacgtgatccccaaagaggagac

SEQ ID NO: 474 - DNA, 1218 bp, Homo sapiens
cagatccaggaattgaagcccaggaacaactcttgcagtgagctccccgggtttttgttttctgaacggtgggaagacaggtcagcaaatagccatgcacgtctgcacatgtgtggctggtgtctgcaggagtaccgagaagacggtgagctctgccctggatggcaacaggaaagggcatccctgtgcagctgtttgtcctggcacaggtggcaggctgccagcgggaccaggaagggaaggggaggatgcacaggtcggagggaacggaacgggcactgcaggtgcgctctgcgatgtgaggaaggaagcaaaggctggttccgggatgatgtcggagaagccttgcagcctagggcactgcccattccacgttacccagtgagtcaaagcctcccagaaagacatttagtcactcaaagccagtgcaggtctcagctttgtccggggaggaactttcactctagaaaacacgaactcatttccctttgaggaagttgtttctccaggatatcatttccagccaccatccaggatgctgggcaggtgctgcagtgcccaaggcacggctgccgaagaagcttgtcccttagaaaccccttgtggcctcggaggcgcctgcctgcctccctgagaatggaaccctgttgggccgccaggctcgctgggcaggtgctggggaaggctgggtcaccgtgctgagcccctcacaggcctgggagttgtgcttggggaggagagctcccagctctttggctgcctcccaatcatggccacatctcacaaacaataccactgtccacgaaaaatgaaaaggtgcctggttctaacccatggccccaaccatgaaagagcccttagaatgtgggggtttgactcgaacagtggctttgagtctcccaggggggattagtgtcctaatgccctgagttaatgaattgacttgttggacagggaaactcagtgaggttcattttctgtggggggacgtttgtcaaatgctgtgaaatcagttgtagcatacgcgacgctcagctgctccgacagtgactcagccacggctccagctgcttccccagccctgtagtggaggtggcagatggtgtcatcagcctggcgcagagggctgtgcccactggcatcacaagggccaggcctgctggtcctccagccactggatccaggtagttacatatgggtttaaaagaagagaggcag

SEQ ID NO: 475 - DNA, 472 bp, Homo sapiens
ggcttggaagccacattgttttttgtcacttataactagagtttcgtccatcaaaagcccattctgcactgatttcagtgataggggtctgatgctggcttggaagagggcctgacagcttagagacaggcttggagttccaagttgatgaaagaacgatgaataatgaaaaataatgtgttgttctaaagtagtgccttttcatactgagctagggtataatttgggtccatttcaagggaaatatactagcagaattcatcaaagtagcccctcgaagactggtgcctgctgcctacgggacaatttaatcagtggttccagctgcacatctagagttgggaacactgaacccaggctttctcatgcagatggggtgtggattgctaaggtggctgtctcctagcgctgcagcatgagtgaaacacgtgtccattctacagagacgcggctccgtgatgctgaaacctcc

SEQ ID NO: 476 - DNA, 1251 bp, Homo sapiens
tagagtgagagagagaaggggaagtcaccgggaggacacacatggagcacgcagcccaaatggggctcctctgttctccctgcagagtcagttcgtacctttcacatgcacaaaggtgttgatccaaccgaagcaatattgattcttgttatattgctttattgtggggtcagtgtcagagtaccacgagttttcatcacgcaccgttctttccccagctgcagtgtgtttagggggggaacgaggccccaccccctatccctatcgcctctgcctttataacggctgctactctctgagcacctgttgagttctttcaccttccagatctaatgtgctatccccacccctagagaacagggctgctggatgccacatggctcccagagaggggctgtggtcagggaagccccagctccaagggggctggaaaaccccagagctgcccacgtgcggcaacacagtctggtgctgcaggtgtgaggacggctacaaaatacctgagccattctgtcactctgtctgaactctgtttgaaatattgtttcaataactgctaggctggtttttccttcctgactatattcctcaaaccaacaagagcctagcagaggaaagcatggccaaaacgccccaagaagagagccttggcttcacctccaagggccaccatccgggaggatgtcctcagacctctgatcccctctctgcaggctctgcccagccctgtgtggcaacccagaggaagcctccccttcgtttgagatttaaccccagaccttaggcgatggctgcccagcctgtcccttccgcctgtgtggctgcccacgcgggcgttgctcatggggctagtcctgggtggatgggtgggggcctctcgccggctcctctgcctcccacccccactggcaccccacgcctgtcctagaaggttctttctgcctgttttctccgtgagtgactggacaggcagaggccggccttgctggagggggcatttgtaattatgagtgaatccaaaacaaggttttttccttccgcagccccccgcccggctgtggggcccagccactgcacttcaccggatgccgtctggttggtcctcaggactgatacagaccaggaccccagggccagcccgtgccaggctcctatgcttccaggagcacgggtgggtggtcctgctgcctggccggccatcctcctggggtcggtctctggccgatcctccctcctcctctcaagccctgc

SEQ ID NO: 477 - DNA, 784 bp, Homo sapiens
atggcccggctgggcgcgctgctcctggccgccgccctgggtgcactgctcagcttcgcgctcctggccgccgcggtcgccagcgactactggtacatcctggaggtggcggacgccggcaatggcagcgcctggcccgggcgcgcagagctgctctcctcgcactcggggctctggcgcatctgcgaaggtaaccggccaccgcgccggccctcctccctccgcgacctcgtccctccgacacccccttaaccccgccctgctcgtgttgccccgccagacccccttccaggacccctctcttgcatcccgctctgccccagggtgtctctccgctccctccccatcaccctccgtcttcccccaaaactgacagcccaagggctacaggagggagggagcccagttcggggcccctcacagccggaggagggggctgtggggcgacagtgggggagggaagcctagaggtgtgtagttggggggcctcatccaagtcaccaggggttgtttcttgatcacgctccccggggtttgggcctggcagccccttgtccccgtccctgtcaggcactgtcagagctgttcaccccacacctcctgatgccgcgggggcaggggttccaaatgtgtacagaggcttcagagtccggggagagagaaggggatcccagcaggctggagggtccacagggccccctccgttccccccagctccctcctccggagctggggccagcctggggagcttccccttcacagcgcgagggctggcagggcaggg

SEQ ID NO: 478 - DNA, 398 bp, Homo sapiens
gtgcacatgtgctggtggcttcctcagtgcaactggggaggagttaggagccttgtgttcatccaacagactgcctaactgtgctccaaagacctcctgacatgcacctgtgtgcacgtgtgcacacgcctgtgcctatgcaggtggctctgcacgcgtgtgagaaccagagagtatgtatgcccacatgacacgagtcaggaagattccagagcgaggcttcccaggagcccgttttgtacaccctttttcctttcaggcaaagcctgagttccacacacaaacgcattacaaggacccctgcctgagggactctgagggggcctccatggagcgtttgaaagtttaaacatgcacctgtgcaggcataacttgcacgtgaaaataaacaaggtgaa

SEQ ID NO: 479 - DNA, 1178 bp, Homo sapiens
caaggctaaaggtcttgggccttttcatcccacttggagtcccagccctgagtttcagcagaagagaagctggcagggccctgtggtgccagggggtcccctgggctcgggtaggctgctgggtgcaccacagcgtccaggccccaggcttcgaggcctatgtttcccagggcagaacggctgcatcccgctggtcgacccttttgccagtgagagcctggacgtctccacctcggtgcagcacctcatctgtgagtcctgggtggggccacctccccatcctttccaaatattcaggcaaggcagatcccagccatccccatccccatcccgcagcactgcttccactgcccctgcgtttccaagaggacgtttccacgcagacctgtcccagtgctgtgctgctgtccctaaccacaggtgcccagctcccagcctatcctgttttcccctgtctcagtttccctctcagtggtgatggctcatccctttgttattggggaagccaggcagctcccagcttggctggatcctgcgggccttgcagactcctggctccccatttaggactcgattcttccagatggcctgctgtctacctggctggcaccttccacctggcgggttgggggacatgtgaggcctggggatgggggctgggagtgttctggggacgcctcccctcctggccttaggaagcccctgccagagtcagagggggccactgggagggtccagtggtgtccacagagatgggcgtcagccgcttttcctgagaagacgaagcaccacgtcactgtcctccggcagacaagtgctgaagggcccacctggaccagaattctcacctgagccccctttcctgcagtgctgcaccgtgcagtcattgtggtcctgcccctgagcctggtccttctcgtgtgtggctggatctgcggcctgctcagctccctggcccagagcgtgtctctgctgcttttcaccggctgctacttcctgctggggagtgagtctggggccctgggggaatggctccaaagatgggagctgggccacaggtcccgggagtggggtgctgcctctcctgttgccctcgtcccctgctcccttctgggcgggtgctgagtctggcgatggagccgtggcaggcagctccctgtggttccagaaggtaccca

SEQ ID NO: 480 - DNA, 1238 bp, Homo sapiens
ccgtgataggagcagggcttctggttgtgggtcagagcctgggacagggaggagcaccggggtccaagcttcttggtgcggggggcatgagggcctccagggcaaccccaggacctgctctactgggtcagatcatgcgggggggcctggggccagcccctcaccacacccttctccttcctgtactgtcctggtgggaggagcaagggttccggggtttggcacagatgaggcagggccaggcatgaaggcaggtgagacagggcaccagaggcctcagctctgaccccagcacaggctgagactgtaaccggtaaccacccatccactgacgcggctccagctctgactacatgccgagtgctggccaagtgctcctccgaaggctcctccgagggccccccagtcccagctgcaggtgagaaatctgaggcctggagagggccgagggcctgggctccccttcacccccactggtgctgtctcctcagtttccaccgactgcccagcactggctgttgcggaaggtggactaggggctcctgacagtctgtcctcagccgcccctgtcaatcaaggctaggcccgagccaggccctgatgtctcaggccagctccactgtcaaggctgtggccacaaggagcagaccatccagggctgggggcaccctccctgtttctctgggaggcctctgtcactgaggaggcccgactgggtgcagagattggggaaaccagcagccttggtattggtcacaggccacatgagaacaacagtgaagtcaaggtctcctctagacaatgaaatcaggaagaatccaaatgacctgaccctgcggcccatctgtgagtgttcaaaatccaattaagaggaccttcgggagccagcgactagagtgtaattgggttgggattgtaaccagaagaacttacagggacacggaccctctgcattgtgcctgggagcgaaggcaccggctagggggtggaggggccggaggtagctggtggatgggtgggggttccactgcgactccagcctccccaggcagagggggcctccatcctagtatgagggtcagctgtgggccgaagcacagagggctctcaggatgtcacaccaaaggcacctgcccagggtcagctcggccctcacccctcactagcactgcaaggagggggagggagatagagggccccagatcgattgggtgcccttccctgagacaggatcttgg

SEQ ID NO: 481 - DNA, 1240 bp, Homo sapiens
ccttccctgagacaggatcttggggggcctgggggaccgacagggcccacggtgacagagtcctttagagtttcccagcttgaggttgcaggtgccagccgcagaggcctcctttaggaggtctgccaggagctgagcctgggccccatcaccagggatttgggaggtacttcaggtcccagtttgggagcttactcttcaccttcattttgggagaaaggccgtgtcctcggccaggctacaggaggcagctggtgtttggagagggctcagctggtggggcggcctgccaggaagtggggccttgggctgcagctgcagccagtgctacaggcagagacaggcagagacaggcacctcctgccgcacggtcagcccccgctgctgggggctgacccccacccctgcttctcccagggaccgcttcattcaatttggcttcacattcttccccaaaataaatccataatttctgttgctacgctgcccagccgggcaggcatccgtgtgtcctccctccctcagcctccccatgccttcttctccccactctctgtcccactcttcttcccaagtttggttcccaggaggaatcacagaagaccaggctgtgttgtgccccttcactgggcaccagtgagatccagacctggccctgaatgtcagcttgggtcagttgccttcttttggctgggcagtgcccagaggggaccctgtgcacccaggaagtgcctgtggggaaatcagggccacctgcccccctggctaacattccctacagtcggcgccaaggacaggctttctcatcagcctgaagctgtgggaagggggtggcactccgggctggttcctccaagctcagtggacaggaaaatgccctggaggcatgggccgagtcccctacctagctcgttgctggaccctgaactgccggatgaagcctggtgcccgccaccctgtgcaaagcccagcttcattcctttgacaacagctttgaccatgtggagagcgggagggaggagagaggagggcccagggcaggcatcctcccctggggaagggcctgaaactcagagctgggaggacaggggggctctggaaggggagtcagagggagggggatgttagccccggaggtagggagggcaaaggtgtgaggaagaggaggcgggggtgcagggcagggactcactctgatcagagcactgggcaacgctgctgccagcagaggccatggctc

SEQ ID NO: 482 - DNA, 855 bp, Homo sapiens
ctgggggccatggagggtacagagtgtgtggggggcagttatgtgagtgggaaccatgttgaggggcaggtggcactgtttgcaggaggctttatgggatgaggtctctgaggtttgaggactgaattggagcctcttaaagctccactccgccaaatgcagttgactacctttagccctgtccaaccccaagcaggaggtggtgtctgggagaggcggccaggttgacagccaggcagggctaaccatgacaggaagggcggtgtgctgcctgcagctctgcctgaatgctagcggggccggggatgctgaggccatgtctgcaggaccacctgggcctgggcccgctagagcagacaccgagcagctgccctccccatctctcccccaggtgtcctgacactggcgggggtcagcatctacatcagctactcgcacctggcctttgcggagacggtgcagcagtatggcccgcagcacatgcagggcgtccgcgtcagcttcggctggtccatggccctggcctggggctcctgtgccttggaggcattcagcggaaccctcctgctctcagctgcctggaccctcagcctgagccccccaatctgtggtcatctgagtccccagcaggtgggagggaggtaagagggggctgggtttccctttgcacctcccgggattgggcggtcagggccagggccccttgagagtctgggaatcccttctctgggcctcgctggggtcctggccaggaaggggctgggggtgacaaggggtggagggcagagccaagaatccagctcctcatgtttctctgtagatatttggggaggctcccctgccccggcaggcttg

SEQ ID NO: 483 - DNA, 1204 bp, Homo sapiens
cccgaagggcaggcttggtggagaagaggctgatgagagggcccgagagcccctccgatttgcaggggtggggggcaaggagctgagcgatccagatgtacccctctgccccctcccttgttctcaagcctgctaggtacttttcactgagcacttccgggaagagcaggcacccagatctctgtccttgtcctggcacaggctgctgctgcttccggcccccgacccttcctctctgcagcaacccgggggaggtatgccactgtgagtgccctggtgggcacactgagctggcagagatggaagtcccagaagggtggggtgggggtgtcatgccatggtggaggagtttggggccactccttgcctgcctcaaagggggcctggctgagggtgcttcttgaccacaggggccagggctgcctagggtggcgcagggctgggcctggagtttgggatgcaggcttgttaaacacagggcagaaccccaggttgggaggggctcagtttgcaggcccaggcccgcaggcccactgctggtcccagggtgagacaggtgagaagagggatggccagcacacacttgagtccccttgggccacaaaggctggggcacgcccaccgttatgcagatggacagttgaggtggctgcaggagaagggttcccagggcctgtacaacacgtggaagcactaaacggccccgtttggggtttgggggcccttcccgagtcttgagaggtcttgagaggtgtgctggggaaggtggcagcctcttgtagcttgatcttcctccaccctgccccacccctaggtctctttattgattcaaaggttaaggaagctcctgggggcttgagggggtggcacagttttggtggggcccagtgaggacaaatctggggggtgagcagggcctcctcttcctcctggtgtttgaacgtttaccattccatgtgggaccattgtgccaatttgtccttaagtaaatcacttgtgctgtgtgcagtataagccttttatttttcttagaacttttcaaaataggtaacacatgcctgtctgtcataaacagtacaaacgtgagcaaacactgtcaccagctgtgcgcgtgtctgtctgtccatccagaggtgttctgagagcgtgtgtgcacgtgtgtgtgtgtccactgtgaagtcatctgtagacatacaagcctact

SEQ ID NO: 484 - DNA, 1327 bp, Homo sapiens
ctgtgaagtcatctgtagacatacaagcctacttcttattcccagatcagcacagggagtggggaggggggcctgggtctccgttttggaaacgggggctggcttcgtgggcatgtcctctcagcttgggaggaaaggtgtggcggactcttcctctcctcctcctggcccccaacttctgctgatgaggcttctcctgggggtttgctgggaagccagggatgtgagcctaacttcaggcctctcacggcagatgtgcttgggctctggggataggacactggggaagacacaccggggaggggctgctgggaccaccagcgttcccggagagtgtgtgtggtggggagggtgtgctgcttgacccttcccttccagaacagagctgcccaccttgcctccacgtgttctggggcgtgtggaacttagccaggccaggtaacttcttcactctctcattggccagccacatccctcaccctctggttggttagtggactccctcacgctctgattggctagtcaactccttcactctgactggccagccacatccctcaccctctgattggctagttgactccactctggccagttgatgccccacactctctgattggccagtcagtgttccttaccctctgaatggccagttaactccctcactctctggctagtctccacagtgattggcccaagggttctgtctgtgttcatggttctctgagtgtcaggctttgcagctgtgattaagaggcggatgagtgcctcccagggaagagacagtgcatggttcaaggtcacccagaatagacaacatgacatcaggctcaaatggtgctgcgtcgtttacagcaagaggagagagcctgtgcaccaaaaccgcttgcaatggtggttcccacggtgggatccactggcccacgtgggcctctttcttcaattttttcttagaatttttcaaaataggtaacacgtgcccttgtgccacaaatagcacaaaggcgagtaaacactgtcaccagctgtgcgcacgtctgtccatccagaggtgttctgtgtgtgtgtgagcaagcgtgtgcacgtgccagaaacaagccctgactcagaggcccttcccccagcatcgaaggcgcttgctcctctcgccacagcaaagccccttctccagggatggcccagctccgccaggtcctgggcccactggcatcccactcgggcatgtttatctgcaccacctggtaggtgcccctgccaggggcctgacctctgtgaggacaggggcctctcatcagctcaggccctatgcccaaccagcatttataaa

SEQ ID NO: 485 - DNA, 581 bp, Homo sapiens
tcttttgtccatttttttctcattttcaatcacatcttgtcccattctatacctggttatttctgattgagtgggggcatcccacatgaataactgtagaggaaattggaggctctgggagacgtcaccttcctccagagaagacggatctttacttctggcaggcagctaggccagaggcacccaccaccccagattgccgtaatcagggatcacagtgcttcacagctggcttcacttctcacgatggtcagtctacttccaattgcccttactcctagtgggtggcccctcagggactcaacccaaagcttgagggtttttttgtttgtttgtttgttttttgagacagagtcttgcttgagggactcttaccagggtctttcagcaggccttgaacttcagcttctgccctcagccctgtgtgcctgtgaaaagttctgctcagttcctcagctcccgagcagacgcgtcgaggaaaagtgtcccaaatgccaggctcacctctctaggttccctcttctcccagatcttgacctcacaattcatgactgccttgcaggctcttcagtactatcaga

SEQ ID NO: 486 - DNA, 855 bp, Homo sapiens
ctgagtaatttattttctaaaaaggaaaatacgtattagaggaccacaagataaaatggaaatccctcaccacggcagttaaagccctgaccatcaagttcccatgtccctttctgcttccttctgacgtttcccttcctgaactcaggaagctgtaactggccacgtggccctgaagaaagggctcctctctgacctagagcgaaggcctgccccgctgcctcccgagctctggtgacgggagctggaagggtgtccttcctgtccctacaccctgtcccagacactggaggaattcagtgtgtgctgacaagcatgggggaggtcctaaccctgagtgttgtgggggtgaaggggaccaaagagccccaggagcaggtaacacctcctctgctgcctgcttgctgggaacacctccactccctgcttccaccccagcccgggcacagggtcccggtcactccgtcctcaggactccaacggcctcagcacaaactcccacttcctcagcaccagttcagtgtcctacaccgagacgtcgcggtgccacacggaagcacggactgctctgtccataggaacagtggcacgcacgccacgtggccagtgtgggccagctcatcagcactcacggcccgcaacccagccatgctcaccaccaccatgttcgtctccacgaaggtgggatcaactgagcagacggacaacaccagctcctggagtcctgggccaggtcctgaggtgagcagaggtgaccccaggccctgaccctgaccccattgccagcaaggtcacccgggaggcagggggcagttcggtcacggtaggagaaggaagggccctgtgtcctgactt

SEQ ID NO: 487 - DNA, 1017 bp, Homo sapiens
gaagacccaggttagaggctctgccagactctgcagagcatcacaatcctggccgtccaccgagggcttccccaggctggactctgcgctgagtagggtctgctgaagcagctggtgccctgggtcccgccctagtgactcaatggccaccctgagtcccaggatccagaagcctgcaggcctgctgggggacccccgacggcacagctcaggccaagtcagaggaagcacagggaagcgagggtggggcgtcctgtccaggcaccttgggtgaatctctgggcgttcccatggtcttgccacagtgcctgctttgtgtcaaccagtcccaccagggccaccgcagccagcatccccacctggtgcatgcttccacccagggctttttggaggcgccaggcttcttcaatgaagtccttgggcctcccagccagggaccccactggggcgcccaggccctgggaggtggagaggagagactcctgccagctcacatccctgtccttgggccagggtggggacagatgcgtagccccatctgcagaggtgttaaaggggaacctggggccagctgccagggatggagctcaggaatccaaccctgcctcctgctggggcgccccaccccacctgtctgtgggaggccagcccagggctttcccaccttggagaggcagaaagacacagagtcacagtgctccacaatgtaggtgggcgggacatgcagggccagcaccacgttcatcagctgggccctgtccaggtggacccaggccccataggtctgggccaggaggtgcacctgggggtgaggtgcaggcagagtcagaggggccaggcctgagggaggcatagagggaggagggtcctgggcttagctgcctgaggaatcaggagggatcaggagacctggctggtgactggctctggtgatctgggacccaagcagtcaggctgtgctgcctaagcctccatgctgggctctgggaggatctgggggtgcacatttaacccagc

SEQ ID NO: 488 - DNA, 1296 bp, Homo sapiens
gcacgtgggtggcaaggaccaggtggagggcactcacacgagcttgttcctgcagcctcatggggcacacgtttctgcgccagggcagcaggtcctggtgctgctctgggactcagctctggggacttgggggtgggggcatctctgctgttgggctggtgcagggactaggggccctgacctggggtaataattccctttgtgtctcagcctaggaccacacatgtgtccttcctgtgacaggtctggccgctgatgggtgcccatggcataaatcagaggggactgaaccccaggatgggccaggggcacaggaagccaggatcaggctggtggggggcacacagtggtggggctgggcctacctggcgtaggtagttgatggggaggatccggacccccgagatgctgtgtgagttctccaggcaaatgagctcgcagacctggtggtagggactctggaggccccgcgtgatcatcctctccagctcagccagtccagagtgcagtggggcagctctgggagggagtgggagtgcactccagccctctgtgggtcaggaagaggatgagggctgaggggtccaggggcacctcttggcggagtggggggctcctctggagtaaggagccagaccctgagtcctgtgtctgctcccccgaggcctgggccttggagcctttcctctgttctgtgcatctagacagacgtcccagctggggggcactgggcccctcccctattaactcttcagatgctgctgtctggctcccgtcgggagcgcgggagtgctccgagtgtccactagagggcaccaggcaccaagcaccgcccaggtgtctgcccggcaagcctggggccagccccagccgctgccgcccccacgtggcaaatctggggctctgctctccttccttcctcccctggagaggctgccatcccagccagcttctccatggctgtccctttctcccctccgcaggtcccagcctggtgcctgggaagggggtttgcccctgagcagcctgtgctggctggaggatgcccagggccccaggtgagcaatgcctgctccttacctgagccaccccaccctgctcatagacgtggaggtggcactcctgcccaaggaggagctgggagccccggcgccagcagtgacacatcactgagacagaaggagggcaggtcttggcattgagtctggaggcatgtggccctgctcagcgtggctaggctgagccctaaggctacagtcaactcacaaatgcctgaggccggcaaggaaacagcac

SEQ ID NO: 489 - DNA, 1527 bp, Homo sapiens
cggagaacaggcctgaggggtgagaggaaggtgtggctgcaggaacccggagccagggctatgtggagaggtccctgacgctggcccagaggccctggggaccctcggaagaggagctagggaggagcagacctgcagcccccactgtcctcctcccccatctccttccagggctccccaccaacccaacagaaatggaggaatgtggtccatgagtgtcagagcccccccatatgcactgaggacctgctaggcagacagaagtcgccctgcgctcaccagagatgaggttggccatagtgttggagggcacaaagagggtgcgccccagccctagcagctccacagccatttcttgcagctctgcggagggacagggaagccgctgtgcttgcacactcgggtgtcagcaccgtccatgctgctttccctgtgtcacttgggccagagcacgccctgagcccaggtgaggcccctagcccgaggctccggtgagcagctgagtgggtttggagccccatccaccagctgcacactctgtgggcttagcaaccacacatccagccccacagggccctcagtcaactctgcaccccacctaccctgggccatggcctctccccgctccccccaagaacctctcttgtggtttgaacctgtccccggcagacctcacacctgtctcacttcctttcccctcagccctttgcaggtggggcctgtggtttctctgctgacttcctttcctcgtcaggagggatgagtggggggctggacggggtgtgagggtgcagctggagggtgaggaaggctcccgctcttgctgtaaagcccactgtggtccccccaactgtggcatcaagtccttagcatgacactcagggctggagtgacctggcctctgccccccctcctcagagcctcctgcactctccacacctgccacatccccacctgcgccctgaagacctttctcaccagtctgcttctgctcctgaagacccctgccctgtgagccggcgctcccttccctgcctgggatgcttccactcagcctgcaggagggctcctctgtgaagcccccttccccgtgagccacagcctcgccccatcctctgcttcccagggcaccctctctagactcccatcaactcaagcgcctccccagcctctccttgagcggcagtgacttgttgacatgtgaggctgcctgggagcatggagatcagcatctccagcaacgctgggcagcagctggatacatgcttagccccagccatcccttaaccccttagcagacgggccctcgggattcaactggtgaccccatggcttgtcctggcctagctgaggggtgtgcacaccccaacagtcaaagtggttcactatggcaactcacaacccagggctggggctgggggtcgctgtaccctggagacactccctaggttattagaacccactccttgcgaggtgcagcctgtagaacctgcccctttctacatctattttccatttgccttctgt

SEQ ID NO: 490 - DNA, 608 bp, Homo sapiens
gttttaagcgccaagggagccacttcccctgcgtcccagaccatcacggacagcgctccgctgccgcctccacgacccccggcctgcacgccggtcttcgccgtagtcgtcgtcccccacgaccgcctcggccatgacgcacctcatggccggcccgggcctggtcaccttgtcgctgcgcaggcccaccacgtaggctgcgacccccgcgctcccacaccccgcccggagcgccccatgtaccggggccgccgctcgggccagtctgcggagcatggcgcgggcagcgcccgactccccaccccggcgggagctgctgactcctctactccccagcgaaggcggcgagagcgacgtggtcggtgcggccagaattcctagagctgggaagcagccgccctgggccgggggtccagggagcgagccccgtggcacgctgggagttgtagttcgcgctccctcgcggcgggcgtgcgcgagcgtctgcgaacgggccccgtggcacgctgggagttgtagtacgggctgcgtcgcggcggagaaccagcgagcccgtgatgctgaagcagaaggttctgctcattgaaggagaaaccgaggccgagcga

SEQ ID NO: 491 - DNA, 819 bp, Homo sapiens
ccaaaagctacatccggggcctgatgacctctcaggggctctccatctctcttccttcagcttggtgggaattgtaagtacccgcagggtcagtggtcccaaggacacccatgtgatggacaggcttgctgccttcccctccccagagcccttctgggcctgacccacaatctgcaccaaattcctgcccttagaaaacaagccccttatctcattgtctggctccagaccttctgctgggaagtagggggcggggaacggaggcctctgtgggaaggaaaggaggtggtctggcggggcagggactgggggcagggatagcagcgctcaggggagaagggggacaaacaaatggacccccggcccctcgagctatggcagaatcacagaatggcctcctgtttgccaagcttcgcagtctgcaaagcctgccctctgcagcttccctgccaatggtcccagcggctttgcagtggaaggatgggcagggaggctggggtcacagaggcccgaggaccctgcccgagaggcacagctggtcacccaacagggcctttctccctttctcccaaatcagagctgtctccccagataggtggcctctccctgggggaacctggggcagaacagtttccttcttctgggtcctcctatctagtccccgggtcacctgggccagccctgccttgtcccagtggggtctgacagtgtggaggagcaagaagggtgggctctcacacggaaaggtgcagtgaggcctgtggcaggtggaccccatgaccccagcttggcctctggggggttgtctgggctcctaca

SEQ ID NO: 492 - DNA, 369 bp, Homo sapiens
accctggctgcaactgagatctgagttgtcttgctggtaagctggggacgggccgcagttcccaggctgggatgagaagcccaaagccctctgtggagccaactctacttgcccccacccctgtcccagcactgaccctcttccctcccctctctgcagttcttcttgacattctcactagaagggtcaccatcactggaggtcctggggtcatctcctgccccaacgcaggctggccccacccccacatgccagctgctcccttctctcctgagcccctgccccccaggactgacccctgcagcccagcccttcccaaacttctgagctcctctgtccgtgggtgcagtggggcccctcggcggggct

SEQ ID NO: 493 - DNA, 1144 bp, Homo sapiens
caatggagggacatgtggttcgccatcccctgcccctgggaccccccaggcagaagtgtgcacaccccccagggtgtgagacccctgtgcagaaggacatggcgaggattccagaggaacaggggctggcctggcctcagcctctcagagtcaggtctgggggtcctgaagacagccccctccctggccttcttgagagatttgcggctcccctgagcagtgggaggccactgggctggctggagggggccttgcgacataagccccaggtgggctgcctttcacggcgcccccggctccctggcacccgcccaggcgcaggcgctggggtgtgggcacacactcacatgctgagttcagtgtgcggattcctgtaacgctgggctgctggcaggaagtgcgcgccggggaggctgctgctgggaacccagggctggccccgctgagataaagggaggcagcagatcgcagctggagatagcggccctgggtcctggtaaacaggtggggggggtggggggggggaaatgtcctttccatcccatcctcttggccctgagcctgcaggatctatagcgccctagcctaagcccagccccgatagcttgggatccagaggggagttgtcggcactgccatcatcattcccagcctgggggactgggtggcaaaggacagggcgctgggcctgggggcctggctgggcccatggtgggcatgcacttggcccacgtgggggccactgggtgtcaaggtcatgtgtgctgttgggagggtgggaaggggaagggagggagctcctccaagcccctgcacttccccaactgggaccccctagtgggaaagatgtccctctccaggttcgccttcagcaccatctccggaaatccagagtgaggtgccatgagggtgcgagaccgggagagaatggggggtggagtgaggggggcgtgagggctgttccccagccaggtgcagagcaggggggctacagagctggggagaccctgtgcatgacttcaacaggaagccacaggatgttcacctgcactccatcagctcaccgtgggctagcgggagctcggcatggcccatccccagtgcccaacacaatgggcgctcaaatacacttgcttgtttaaaa

SEQ ID NO: 494 - DNA, 1247 bp, Homo sapiens
ccgcttctgtctttagatacggttgcaagctgtggtgtgtgtggacaggggaatggggacttagggattgggctggggggaccctcaggaacccctctactgccttccaggtgtccccagcttgggctgagaccagggcacccccttgtgccttctgcccccacctgctccctcctgggcctaccagcctgcggccgcactggctgctgacagctgggacgctggggtctggcgttatttactgcggcagcttcctcctccttccaggaacttgtcctctaacttggggcggcagcgaggcctctaatctttcggatctcgtttaccggcattggcctctcacttcctgttgctaggcctggaccgaggcacggggtcagctccgtgcactgcgccttgcctgttgccggggcctctgttctggcccctcggcagggaggacagagggtcagatgccgggcctcaggcacagtggccatctggggtagggccagctccacagaggcaggggacccaaggctgagccggctgtgggctctgcttcctggagtccagggtccagcacggggaccaggttattccttcgctcctcctggcttggcagagcgtcatggaaggtggccttccccagactcccccacatcccctcctcccacttctgcagccaccagagccagggcccttgtgggaaaggacagggaagtctcaggagtttgggcacagacaagatccctggagaccgtggggtctgctgccctggagatgtggaatcccaggccttgcccacctcctccaccctgggtgggttccccaaccacccagaggagtgctggcatctcggggccaccagggcatgggcaagagtggctgcccagcccctgccaagggcctgaagccagcgccaggcagaccctgccttgttgagcagtatcttcagtaagggctctgtgtgccgaacacctgctgtgcgccctgcacacttatcccagagatgggattcaaacccaggttgcccagcgcagagaaacagcattctccttctgcatccgtgaaggaagctttgtcttctaaaagccctagcccttctgttaccttgtcctcagccggcctgcttctgtccctgtgccataagccagatgaatttctctcccaggctggccctgcagaggatgagagatggcccttgttagaggcaccctgggcaccccaggcatggctccccagctgatgatagaacaactgagaca

SEQ ID NO: 495 - DNA, 470 bp, Homo sapiens
atgtgccgtctgattaggaacccaagagccccttcctgggaacagaaggacaactggcacctgctgaggcacgcccacttgccgagctgccctgggatccctgggcagagcgtcatcgcttaagaacctaattccacaacaaatatttgtcacgctcctgccagggccctggcaggagcagaggcggtgtgtactgccatgcattcctggtctgttgggtgattgacacatacaagacgccagcggtcctgagagtcaggtgccttcctggaccccttggtgagcggaggtgagttgccatcaaggagggaagattcaggaagataactccaaggtcctcaatccgtccaccagtcagtggatggcaaacataatccatgggcactgattaggtttgccagcccatgctgagtgctgggttcagtgtccttcgtctcctgccaaggggagaggacctcgaatggacgcct

SEQ ID NO: 496 - DNA, 1269 bp, Homo sapiens
ggaaacggatagcagagggtggagaggggcttgcttctaaaggcgagacgtgaacctagtgggatgaccaggcagggtgggggtggtggggagttgtggggaggccagtacagaacagctccagggagggcatggagcatggtgtgagcaggaggcctgtctgacctccggggatggccccgtgggacagaggaccttgaaagccaggcagagggatgggatcagatactaacgcccatagggagccctggcaggtccttgagcaggggcatggcagggcaagccttcctttagcccagggtgagcttgcgccaacccgtgctgcagaggagaagggcatggaggatagctactccctctgggtgttcttccggcccggctaccctcagccagagctcaggaatcacactcccctggaacctggagttttggattcaatctttattcaataaatggcttattgggaaccgacagggtggctagagcctgcctggtgttggggttgggggaccctgcctggtggtttgggctctgtgggtgtgtgaggaccactccacggtggtgctggcgttccccattccactctgggctcagcgcccctgacacactccccctgcccactctggaggccaggccccctggtgctgggggaggcactggcttggagaggagcccctggctggtcctcctagaagagagagtctgtggggtgggcctccacagccctgccgggccccacacgggcagctgttcccggaatgggggtttgaaacttttcttttgttggcgaatatgcatgtggtcttaattattaatatgcagcacttatctcccccaaatgttttatcgggattcggcagatccgagtgtgcaggcagtgggtgcgggggcagggcagggatattatgggagcacagggaggccccagaagttggagtgtcctccaaatcagctggatgacccagaggaaggaaagaccctggttaacgatggtcaagttaactctttcaggccctgcccaatgctgcaaaatcgcacctgggtgtttggcctgggtaggcctaccgcgcctttctgggttctggcctatgccgatgtctcccctgccccgcaggaccctggtggactggagggaaggtagggagccgcatctctcagcagcaacccaggacttaaggagggccattgcccttttctggtgggggtgaaggaggaggaagcagcgtgaccttggaatccgtcacctattaacttcccgcgtatcacctg

SEQ ID NO: 497 - DNA, 1776 bp, Homo sapiens
cagagtgagacgagtcacagatctgaggacctccagcagagcagggaggtgcccaggtggggggcgggcgggtggtctttcttttggggcagcatcccaaaagaaaggaaaaacagcagggggcgtggctcccctcactgccccgcaaccatccctgcctggccagggccttttgggcagtgccactggagattcctggaagtgccttcgggccacacacacacacatcctccgggaccctcccagccccccactctgcgcttcccgggtttgcaggagggccccaaggccagccgggagccctgcaggacctgggaggaacctgagcctgaagggtctaggagcccgccgtgtctgctctcaagtgccccgcgttcccttggcctgatccccgatcccgtgcaccctgcacccagtaggccctccggggccggggctgaatcagcttcggaggcttcagcaaggcattgcagggggtccctacgggaggtttagtccagggcactcgcagtgttgtgggacgctgggcagggctgatcccagccactgagtcttcccgggcagagagcagacaggggggcattgggatttggaggggcacccgggaacctcctgtcccttccgggccgcctccccttaccctgatttcccttgcagggagggctgtgcaggtttgtggtggggtggggaggacttcctagaatttgttgctttgattggaatcttccctattggggcagggttggggtgagctcttgcccaccctgcccaccccctgccgccagaatcctgggctccctccgttgagttgtgttggggtcggggagcttcgtttatggcatccctgaattcaccccaggctttgaagtcaggctcgctccacaggaaaagctcttccaagagggagattccctggacctcctgggcctccgcctggtaattggcgcttcgattaacagctcgggtgcgaggggcacttcagtggggggcagggcagctgagtcaggggcccagcccaggggagatgttacaggagggaggacgggaagggaggcggggaggttggtaattccagattgaggagggtctccgtagctctccgagtgggtgaggacccctcggaggcaagtgtggggtcccccagggcctgctgggcccccttgggcccctggaacaatgggttcccactagccaacctgttcccacagccagaagttgccatggtgaccccctcccaccttcagctacagcttttccagtaaaaccactgcagaaatccatacttcccgacaggcacgcccggccccccaccccccactctgcgcggtcttggagcctcggggagttaaccctgcgcatgctggtgtctgttgtttgggggagacgggagtgagagccggcaatgcgggccccaggctggagaggagagggtggacgggggcaagacaagctgccctgtccttgaaggccccagcgagtgacttgagcaactccaggaagctggagcggagcagtgaagctagctctgacctaggggcccccttggcacagaggaggcctagctggggcccacagcgcagctcaccccttctagagtgaccccctgcccgcagtcgctgggacacgagacccttcccggcctggctgcagctgctaccctgttagccgatcccctcttcctcctctcccctcccggcacaaacctttttcctggaggcagagagggctcagtcccaggtccccgtggccctgctgccagcacctggcggcccccaa

SEQ ID NO: 498 - DNA, 819 bp, Homo sapiens
cttggggaagaggatccccctagaaggttctgtcctgctgcctctgccaggtggaggggcccctggggacaccccaggctgcaggggctcagggggctccgtggcccaggcccagcctcacttctgcagccagagtgagcaaggagatgctgtaattgttctctctgtagcccaggatgaataattgagaggtctttgaagagaattaattagccagcttattgactggaaacgctttgctgcagatgatggaggatggaagcctgcgtggggcccgtttgccggctggggccgcaccagacattcaattcacacccatggctgctcagcgggaccaggggctcggcctttgcctagtacctgctctctcctgctcaggaggaagtgggggagctgagccccaacttggcaccctgctgtggttctgtcctgatttctggtatggggagggggggcagcaccccttagactcaactctgctctgtcttctaagaggcaagatgggggcctctccaggagtgggggtgggtgtggctcagtcttgggagcagttcccttgcaggatagactctggtcctgggctccttcagtccagcccaccccaccgcctgagccccagccccttttcgggaactagggagtgacaggaaaagacgaaagcgttcttgcctgcaggctgcagggggtcagacatgtcgatgtccctggtgaggctgaggagggccggttctcatggaatggacaaggcgctaggcaggaaatgctggatcactagccccgggtaccagtcattaatagtagtagtaaacattcctccag

SEQ ID NO: 499 - DNA, 556 bp, Homo sapiens
tcacacaccgtttttaagctggctcaaggatccgtgctctgatgcatcctccagtcccaggcgacgtcaacatggaagatgtgggcaagaggcaaacagtcatgaagggcttgggccatgtggaggatgagcaggaggtgggggccctgagagcgggcccagggttcagccctgcctctgcagctgctggagcaccagtgaagagagggcaggtgccagcaggcatggtgcaactgtgggggacatgggcggggcagggggtacctgggtggagctggttggggaccattgctcttggtccagataaggcatgacaaggcctgggccaagacccctgaaatggggcatggagagtctgtgacagctctgagatatgtggaggggaaggggaatggaacctggtgacttgtggacctgcggaatgggggacaggagttgagatgactccaggtatctcccgacatgagcacatgtatctgcaaatgaggcgggggtcaggaagcacagggagcttgctcttgccccgggggcctaggatgccctgggctgtcatcat

SEQ ID NO: 500 - DNA, 864 bp, Homo sapiens
atagccctctccatgcctctctgtccagggctgggattggttggcatactctgcatgcctttccccagccctccagctgtcctagagttgggctgggataaccctccagccgccctgtgagttgcactgggatcagtcaggtgtactctgcatgcctcaccccagcccccgagccgtcccgtgggttggagttgtttgcgtcactggctttctgttctcagctgacttagctgggacgtcaacaactccctatgtcagaggcaagtctccgcctgcatctgccagagctccacacagctgcagacacctgtggcttcatctgagtcctcatctcggcctctgggaaccactccttcctaccctttgcctggagacagtggaagccgagggacatttctccgaatggcgttcacttggctccagaaatgagaactggaatgaggaagaggaatcagtctccctccaggtggctgaagctaggcacgtggaacctgggagcagcgggcagccacactggtgcccttcagacagcaggagggggctcttgtccgaagctctgagttcaaaacagaggggacatgggggaacagcaggaggtaggatcaggccccccaactcctgccgagagctcacacctgtcttcagcccctcctgcattcctgccagtggtagccatttgcccttttggttgcctggtgtccaaataccctttctacgttggaggtagggtcctgggggtccctgctccctttcccaggctctgaaaactgactcctgggaatgtgaccaaaatgattacattaaatgcttccacctgaatgtttaatcgtgaagatgagatgccaagttcaagagtaatttagg

SEQ ID NO: 501 - DNA, 1753 bp, Homo sapiens
ggtgggctgggcagagcctcccacctgctcccctggaggcccatgagtctgggcactggggccccaattcctataaaccggggttgattacggaggactcccctcacctgcaaccccgcctcccaccacagagcccaggcagcagggaagcctggagacaggcgcagagcctctgggcctgggtgcctacccctgcccacccccagggcctcaggccacaggagaccacctaaagcaggagccgggagtagggcccaggctgggctggcacagctgggcctgtgaggggtggaggggccgctggggaagggacttaccagcagcagctctgctgggacctgggaggctctcctcatttccagtaacaagcgggggtgggggcagtgggagggaggaggcggctttccccaggtgccagctgtgcttgaagacagcctgtcccctctgctgtctcctgttctcagctccttaatcccctccccgacctcgtagttgactcctgggctgactcctcccctggaagggaaagaagagccgggctcacccacacccaacaggtgcagcagctgcttgaggtcacagttgctgagaagggaagctgaggccagtggcagctccagccagggttggtgcagcctgctgaggggtcgaggtcacccaatcacccacccagctccacctgcccccacccctcccacccagcctggccaccagcccagacaccttcctcacatggcctgaagacccctgctgacctgtggcaccatgtggcccagcagggtggccaggctggccggggtcatggggtgggggacgctgctccccacctgccctggggtggtcggtgctgttggggaggccactctctaggggcatctgccaggtaggcagaccagaaacttaccccgagttctgtgacccgctccggggagcggggcatctcatgtcctctcagccacgtctgaaagctgggacatggcagagtgggcagggctgccctctgagctgacccccttcccctcctccccatcttgtctctcctcagatctagggctcactctgaggcgtgggtgacacttgccccccaaccccagcctcttcagtgcagggaggcagggcctgaacttcggagggccttggggcaggttcctggggcttgcagtgaggcctcccctttcccagggagaggaagggagaagccgcgtctggcgagggaagcctgtaccctcaccctcactgtgtccagatctgcacccctaacctggcctggggagactggcaccaggtggagctggtccccaaggagccccaaaccccagaacatctgctgcaggggtcagctctcagggggccccagggccagtcctctctgcaccccaccttccctgctcaatgtggcttgtaggaggttatgcaaagcattatgcaaagcacatgcaaatgagacccaaccacaactggtcactctctccaggcaagaccactgaagccctctggtcatcagcaggaatgcaggggcgcctatggcaggccggactccaggtcaggccttggggcagtgaggaagaaggtgcatgccaggtaagctatagtcaaaagggagggacacacaccaccaggcgaatgaatgaagcaaatcaatggcactcctccctgccccagaattcaaaatgacagaccggtgcagacagatgcatgtgtgttctgagaggtggttgtgtacaagcaagctcactccttcagtctcccattc

SEQ ID NO: 502 - DNA, 508 bp, Homo sapiens
actctcgggtacctggggcgaaggtcgggaagccaggccttctgtaaagcttttaaggacagaaggtgtagcctcccaagttagcacactctggagccccgaatgcagttgccctctacagacctggtcagggcctcaccctgcagcccaggggaagggactgggggctttaaagctctcgcaggtctctgtttggctgtgtggcccaggaccagctccttctactctcctgctgtgaatcagcagcaccacccccgacttagtagcatagtgtgaggctgacgtgcacgtgggtgtgaatcccggtcagcgccactcgttgtgcctttgcgcttcaatggtccctgccaaggctgtggcagcagctcctgagctccccaccatacctcgcctaaagccttagggacaagttcagccacctgagaccaaaagcgccctgcctggctagctctaagcctccaaataacccctgggatcccagcagttcttcactgtaagagtttacttg

SEQ ID NO: 503 - DNA, 800 bp, Homo sapiens
ctccaaattcacgtctataagaacgattttcctgccccaaccatacatttctcacagataaaggtgcatttttatcatttcgtctttcctggggctgaaatggcttcttctttttgcattttatggttttacaattgtagcagtaaaacattcttgccggcaagatgattgaaaatttaactacaaaaggcatcattcattttatttttgtcttcattggagacataaaatggattcgcaatcatcccaccacagtggttgagtattgtgggttttagagttgctcacatagcacatttatactcaccagtgtgagggctctttgcagccgccaatggagtgatcgtttgtgttttggaagcagcagtaacatttattcctaataatcctgctgcagtgggttcttggtattttatagttgttattgcagtaaaatttatatcctacagaattatgacaatattcagctactaatatgattattatttgtgtgtgtgtgttaaaaccacggaaataaaatttactcccaacaatacagtggcaattttatgtccctaaacctgaccgtaaataataaacataactacagaatgcctgtaaacacataaaacatccttctcggaaaaagtgaactctccattgctatcctgatgagaccagcagctggggagcctggtctagcagttagggctcctgggcagacttcaaaaggatgaagcaacttcttcacaggactcctggagagcaagttgcttaacatttcagagtccaagtcagcccgtctcagagaacgtgggctg

SEQ ID NO: 504 - DNA, 409 bp, Homo sapiens
cctgcaaggctgtcggttcatgcgctcattccttcactcattactgcagtcctactctgtgtattcattattgcagtcctactgtgtgtgcctcacctctgcagccggatcctgccccagccccaggcatgaaggcatggagcccctgcctgtgcacgtccttcttcctgggctaccctgcctctccccttgtgcctgacattgagggctgtgagacctcctactcgtcacccctcagccagctctgtttggccccccaaaagccttgggacctcctcgggtcctggacgtgggactggctctgattctagcctctgggctgggctgctgctgacaagtgttcagctcctgctgctcagatgaatgaagggacagaaggcgggtgtctaggcatggccgggacctggga

SEQ ID NO: 505 - DNA, 1411 bp, Homo sapiens
gccctgcagtttctcctcctgcgccgtgccccgcatgatctgcccccagcgaggaaggagactgaagagcagcagggagggtccctggagacagagcgggcagagtgggctcgacgcacccctgacacccatcagcaggcgccttcctcaatgcggacaggcagaccctcctctcttgggcacacactcagtcagcccctgggtcagttgctcctcctaaaatgggactgacagttgaagacctccaagcttcccagtcatagcagtggcccctctcagcccacacccagtccactctggattgctagtggggatcccccgagacagggttctcccccaggctggtcagccccacatctgtgaagctttctgggcctctccacacccccagttctctgaggcaggcggggtctccagggcaaactcgtgtgagcctcacctgtgtgttgcaccgtcctgtctgcaaacagaaaccctcacgctgccgagccgatgcctctgtccccagcacctccttggggacggtggactccatggtcaaagggccaactcaggggagccacagtatctgtgcttcaggcagcccgagttgaggacgtgtggcattctgctggcatcgttcatgcctcactcttggctctggggctgggcacttgctttctggcccagcctgccgccagggtgaatggcctctggggcagatggcgttctgggaacaggtaatgtcctggccagcgggcaggccggagctggagcctgggtggagggctccccaaggaccaccctgggtcccactcggctttccctgcgtgggggcgacactgttgccagttacagaccgcccaagagtgccccgagatctaagcataggacacaacaggggctggtctcatccacctcggatccacccacctgcagcccagtccggctgtgtccctcaggtcacactcactgtgttttgagaactctcctccgggcctacaaagtttgccaaggcgaatgtcaaagggatatgggggcaacagctcccaagatcagccctaatccaccctcctcatctgccctctccatggggcctcactccatgtctccaacatctcaggttggtgtccaagccacggcctcacatggactcacctcctgcttcagtctctgtttctgaccaggcttcttgctcccagggaggagcgagcttggaccgctgctctcagaagggaccctcctagctggacctgcccctgatttggccgggtgccctgggctctgtgcccatctccaccaacctcccagaagcgagagctggatacctgcctctctgtgtccagcttccttccttccttcctcaacaatcagttattaaacacccaggatacagatgcacggtgctgctgcagctgtcctccaggctgcc

SEQ ID NO: 506 - DNA, 1159 bp, Homo sapiens
aagtagttccctttctgttgcattgggacctagaggcacatggcctgggcctgcccaagggtgtcttgtgaccatgagggagagtctgcagaggacagggcccctccccgtgcaggagggcctggctagttgagtgagtctctgatgaggcagtgcctccgagggtcagtcatgctcaaactcagtgtgccccaagtcctgacccctggtattctgggctatcactgcccaggaaaacagcactccaaaccctggccttcaggcctgttcctttatgcttatcgctggaatccctggtccagagggtcttcaaatccacacaagcccctcctgcttggccctaacccgatgggttaagcgtttcaagggagggcttgagaggtccccaggacatgcctggagggccaataaatgaccgtgaacggtggtgagtgaggcaggtggagagtgtgaccatgaagagcagggcagactccccagagtactgtagggaggcagctgcagtctggatgaagagtacacgccaaggccaattgtggttgctggtgggatgcagctgggaaagcgagagtgaggaccccagaccctggcggctgcaatgcctgggggcatgtgacatggtggtgaagggggaattgtgtgttgatcctaccctggccgcaagtccaggctcacaggccatggccactgaccacaggaagaggcctccctccttaaagtcgggagaatatcccagaactaaggctagtcctgcatcctggccgggaatcccaggccaacaccctccccgcgatcttaggtgcttagcagccctggctggtgacccctgggcggagagagtacggtaatttgcaagaaatccaagaaagccctggtgagtggttgcttttcctatgttgcaaccatccgcgaagtgaatgctgctctgtgtctctattgttgttttgatggtgttcgagatgatgaggagaacctgagtcacagcctttacgagtctgatttcctcaatttacaggagctgcctacgcgttctggaagaattcacatgctgatttgtaggcggcctggccaggtgcttcggagactccagcagcatcgaaggtgtgattttagatctgtactcccgaggctcttgtgttatttaagaaggtcagtgtga

SEQ ID NO: 507 - DNA, 443 bp, Homo sapiens
cccctggccctcactcagcctctcctcagcctgccactcctgatggggacctactctggctctgtcctccccacccaaacacagcacccccacaagcagtggggagaggtccccagtggagcaggagtcctcctggactttgtacctggggccaccccagcagttaccgctttaaaaagaccacaacaaatgctaagctttggtgttctttatagaattctttttaaaaaacaaaaaaatgatcatcatgttttgtttgttttccatttagaagagaaacactttctcattattttaaaaatagaaacattacagaataggtactgtggaaagtgaaactgtcctttcccccgccaagcctctgtccctctcttctttcttcctgggggctcagcctgccagggccactgagctctaccatacaggttatagctacctgtcac

SEQ ID NO: 508 - DNA, 774 bp, Homo sapiens
acaatgactgtctttatggttgaactcttcgtttcttgcggctgaaatcacaggggtgagacttgctggcctcccatgccctgtcaccccttgcgtttatgctgttccagtcccggagcccctggcccccaggtctgccatggatactgtgtccatccagccaggcgcctccctaaggccacctcctcctcaggggcttcccaggtgtcccagcagccaggggcaggcgtgccccggggttactccttttttctgacgtgtctcatgccctgcctttgtcatgggtcgctgggcaatcactgcttctcttctcgcctgtcccctccaccttcctgttcccccacaaactgtgagcccatagggagcagagagtacggcttcctgtatctttccctcatcccagcctcatggatcacatggagagcaggccacagactcagtttaaccagtctgctacatgtcttctctgggccaggaaacgaggtcaggcctcctcattccttcctgggccggcgggctcccttcacctcatcctgttcctgggttattcgcttctgacgcgaggccctagggccaccccagctccacatcggcctgtcttctctgcgccctgtggctgactcagccctgaatcacctcttccaccccaggtcctcttcccgggagaagctccaccatgggtgccatttctccttgtcccaggcttttcttgcctctggggactccaagcccttctccgggggatttcacccagctgctgtatatgactctctg

SEQ ID NO: 509 - DNA, 1225 bp, Homo sapiens
cgaatgagactctggggacaggaagtatttcagtcgatgtcgtcatgttgccagcttcacggggaccaaccaatgggcaggggaaggaaggagggccacgccagtgtgtctcttgtcctggctaggcatagggtcccaagccagagttggggacaagctgaccaagcaaacctcttggggtggctgctcctttcccagggaatccatgcgagagggtggccagggtctgcaggcaatgccaccgggccactgtggatgggagccagtggacttccaggaagggaagctaaagataccctcttcccggcatagcccagaaaggaccgggatctagttccctgtcctgttgtctctgggggcaggggtggtgaccctgagggccctggagcagctatgtggggctgggcacttctgggggctggagtctgggaccgggcatctattggccgagactctggaccggtgggcgagggcagggcagggtgggtgaattactggaagccccactggctctgtctctctgccaagctgcccactgcattctttggcctcctatttccaggcagtgtctgggatgggtcccaggcctggcctgccctgcaccggggagtccgtgtttggagtcaactgagctactgcttagggcggcagctgaggtgggtgggtgcagcttggacatgatgctatcagggacgctgggtacctggaacaaggaccgcctctccctagtgccatcctgggagctcaggtgacctgggagggaagggacatgtgtgagtgcctgtgtgtgcgcaagcgttcattgtggggggtgtgcacgtgcgtgtgcacacgctagcataggtggctgcgttgagacgaggggtcacaggcccgcatgtgcccgagtgtcctaggatgtgtgggtgagtgcaaaccttgggcaggccctgtcttctctagacatccccgtctggtggggtggccagaggggtggcatgggcagtttgggtctggatccctaacccacaacctgccccagggcagctgcccagagtgcttatgccagaacatctccaaggccgccagacgttgggatcgcatgtgccactgcattggctgtccccacccccatccccacgcctctgcccagggactgtagggtcggcgagaagcaaaggcgtgcccccatgcactctggtggctgcaccatggacactgaggttgatgcctggggttttcttag

SEQ ID NO: 510 - DNA, 912 bp, Homo sapiens
acggttctggtgtttaagtgaggtcaggcatcctctgggaggtcagccgtcgtattgggttccaggcccgtgactactcacgggaggagtgagctgggccactgactccgtctctcacaagcctggaactggggagcaggagaatccctcacctcgtggggctgtggtggggacacttgtgtgggatgcagccagctcaggataggggcagcgaggaccaggcacgagtgggaggagcggggccctcagggctctgtagggttcttgactttttctcgcttctgtggcctcctcctatctccttccctagggccccacctggccttccgaatcctctcacggggcatatcagatctaccccagctgcctgaccgggagagcatcctgttcttcccctctggaattccgggtccacagctgtcttcctactcacatctggcctcggcattcccgccaagccctccccttgaagcacaaggatgttttgtccaggatcctgagcccagggccttccaggtggcagagagagatccggatgtccagccagctctgggggttcccccatcctgccagtgtggggacctccttgctgtagccaggtcaggccagccctagggagacagcaggatggttccaggaagcctgggccgctccccagatcaatgcagggacggacagcagccagcaggctgggccacggcatcagagctggggtcaagaggtttctagccctcttgtggctctcagccccgggtcctggctgcttcctgctgggcagtgacctccccagtccatttccctccctccttcctcccctggcctgagctcagctcatggaaggaggccctgtgtgcaggaaccttgatctgcacctctgaaggatgtcagggcagctttttctctgggcctgta

SEQ ID NO: 511 - DNA, 513 bp, Homo sapiens
tcccactccccagctccccatctctagaccgagggagccaattaggctctcccgcagcaacaggtggtgagatagaagcttcgaggtggaggtaaagagtgaggactgtgcagcaatgaggagtggcccagatgggtctccctcccttcctgtgccacttctgcaggccccagtgcctgaggggtccagggccctatttggagagctccatggtggaggaggctgctcctccttcctgtggaccactccctgtcccaggggctgctgaccctgcttcactgcctggtggtggatgacgaggtcattatgagattagcacacactccaacgctgggtggagaaactagggtgggagccgagatcttctccagctagttcatgccctgaacaacatgagaaggaagctggggatggtctcacactttgagcttctcccacctgtcaaggttccctgtcttccttccagagccctcttccagcccctgcagcctctgtccccactgccatcccttg
